(19) United States
(12) Patent Application Publication
(10) Pub. No.: US 2023/0086199 A1
(43) Pub. Date: Mar. 23, 2023

(54) SYSTEMS AND METHODS FOR EVALUATING CAS9-INDEPENDENT OFF-TARGET EDITING OF NUCLEIC ACIDS

(71) Applicants: The Broad Institute, Inc., Cambridge, MA (US); President and Fellows of Harvard College, Cambridge, MA (US)

(72) Inventors: David R. Liu, Cambridge, MA (US); Jordan Leigh Doman, Cambridge, MA (US); Aditya Raguram, Cambridge, MA (US)

(73) Assignees: The Broad Institute, Inc., Cambridge, MA (US); President and Fellows of Harvard College, Cambridge, MA (US)

(21) Appl. No.: 17/779,953

(22) PCT Filed: Nov. 25, 2020
(86) PCT No.: PCT/US2020/062428

§ 371 Date: May 25, 2022

Related U.S. Application Data
(60) Provisional application No. 62/940,859, filed on Nov. 26, 2019.

(51) Int. Cl. C12Q 1/6827; C12N 9/22; C12N 15/11

(52) U.S. Cl. CPC C12Q 1/6827; C12N 9/22; C12Y 305/04005; C12N 15/111; C12N 2310/20

(57) ABSTRACT

The instant specification provides novel assays and systems for determining off-target effects of base editors. These assays and systems may comprise bacterial and/or eukaryotic cell systems and may be used to determine off-target editing frequencies, including Cas9-independent off-target editing frequencies. Also provided herein are novel base editors, wherein the base editors have reduced Cas9-independent off-target editing frequencies while maintaining high on-target editing efficiencies. Further provided are methods of contacting a nucleic acid molecule with these base editors to obtain reduced off-target editing frequencies, and in particular reduced Cas9-independent off-target editing events. Further provided are methods of treatment comprising administering these base editors to a subject. Also provided are pharmaceutical compositions comprising the base editors described herein, and nucleic acids, vectors, cells, and kits useful for the generation of these base editors.

### RELATED APPLICATIONS

[0001] This application claims priority under 35 U.S.C. § 119(e) to U.S. Provisional Application, U.S. Ser. No. 62/940,859, filed Nov. 26, 2019, which is incorporated herein by reference.

### FEDERALLY SPONSORED RESEARCH

[0002] This invention was made with government support under grant numbers AI142756, HG009490, and GM118062 awarded by the National Institutes of Health. The government has certain rights in the invention.

### BACKGROUND OF THE INVENTION

[0003] Targeted editing of nucleic acid sequences, including the targeted cleavage or targeted introduction of a specific modification into genomic DNA, is a highly promising approach for the study of gene function and also has the potential to provide new therapies for genetic diseases, including those caused by point mutations. Point mutations represent the majority of known human genetic variants associated with disease. Developing robust methods to introduce and correct point mutations is therefore important in understanding and treating diseases with a genetic component. Base editors can perform remarkably clean and efficient nucleobase conversions in target DNA sequences with very low levels of undesirable by-products. However, unintended editing of off-target bases does occur at low frequencies.

[0004] Off-target base editing can arise from Cas9/guide RNA-dependent or Cas9-independent editing events. The former result from RNA-guided binding of the Cas9 domain to DNA sites that are similar, but not identical, to the target DNA locus. The latter arise from stochastic associations of base editors with DNA sites that do not have a high degree of sequence identity to the target locus due to an intrinsic affinity of the base editor, particularly when overexpressed, for DNA.

[0005] There is an unrecognized need in the art for assays and systems to evaluate the frequency of off-target base editing, as well as base editors that have reduced Cas9-independent off-target editing frequency while retaining high on-target editing efficiency.

### SUMMARY OF THE INVENTION

[0006] Various base editors (BEs) have been recently developed. Reference is made to Komor, A. C. et al., Improved base excision repair inhibition and bacteriophage Mu Gam protein yields C:G-to-T:A base editors with higher efficiency and product purity, Sci. Adv. 3 (2017); Rees, H. A. et al., Improving the DNA specificity and applicability of base editing through protein engineering and protein delivery, Nat. Commun. 8, 15790 (2017); U.S. Patent Publication No. 2018-0073012, published Mar. 15, 2018; U.S. Patent Publication No. 2017-0121693, published May 4, 2017; International Publication No. WO 2017/070633, published Apr. 27, 2017; U.S. Patent Publication No. 2015-0166980, published Jun. 18, 2015; U.S. Pat. No. 9,840,699, issued Dec. 12, 2017; and U.S. Pat. No. 10,077,453, issued Sep. 18, 2018; International Patent Publication No. WO 2020/102659, published May 22, 2020; International Patent Publication No. WO 2020/181180, published Sep. 10, 2020; and International Patent Publication No. WO 2020/214842, published Oct. 22, 2020; each of which is incorporated herein by reference. Base editors are fusions of a Cas (“CRISPR-associated”) domain and a nucleotide modification domain (e.g., a natural or evolved deaminase, such as a cytidine deaminase, e.g., APOBEC1 (“apolipoprotein B mRNA editing enzyme, catalytic polypeptide 1”), CDA (“cytosine deaminase”), and AID (“activation-induced cytidine deaminase”)) domains. In some cases, base editors may also include proteins or domains that alter cellular DNA repair processes to increase the efficiency and/or stability of the resulting single-nucleotide change.

[0007] Two classes of base editors have been generally described to date: cytosine base editors, which convert target C:G base pairs to T:A base pairs, and adenosine base editors, which convert A:T base pairs to G:C base pairs. Collectively, these two classes of base editors enable the targeted installation of all possible transition mutations (C-to-T, G-to-A, A-to-G, T-to-C, C-to-U, and A-to-U), which collectively account for about 61% of known human pathogenic single nucleotide polymorphisms (SNPs) in the ClinVar database. See Gaudelli, N. M. et al., Programmable base editing of A:T to G:C in genomic DNA without DNA cleavage. Nature 551, 464-471 (2017), which is incorporated herein by reference. In particular, C-to-T base editors use a cytidine deaminase domain to convert cytidine to uridine in the single-stranded DNA loop created by the Cas9 (“CRISPR-associated protein 9”) domain. The opposite strand is nicked by Cas9 to stimulate DNA repair mechanisms that use the edited strand as a template, while a fused uracil glycosylase inhibitor slows excision of the edited base. Eventually, DNA repair leads to a C:G to T:A base pair conversion. This class of base editor is described in U.S. Patent Publication No. 2017/0121693, published May 4, 2017, which issued on Jan. 1, 2019, as U.S. Pat. No. 10,167,457, each of which is incorporated herein by reference.

[0008] Cytosine base editors (CBEs), fusions of catalytically impaired Cas9 proteins, cytidine deaminases, and uracil glycosylase inhibitors, enable the targeted conversion of C:G to T:A base pairs in genomic DNA. Recent studies report that BE3, the original CBE, can induce a low frequency of off-target Cas9-independent DNA deamination in mouse embryos and in rice. See Y. Zong, Y. et al. Nat. Biotechnol. 35, 438-440 (2017).

[0009] Accordingly, the present disclosure describes multiple assays that measure the propensity of different base editors to induce Cas9-independent deamination in E. coli and in human cells, such as methods that do not require whole-genome sequencing, are described herein. These methods enable the identification of base editors that exhibit reduced levels of Cas9-independent deamination, and also display restricted on-target activity either in the form of a narrowed on-target editing window or lower average editing efficiency.

[0010] The present disclosure further describes novel CBE variants that exhibit increased on-target editing efficiency while maintaining minimized off-target DNA editing relative to existing CBEs. These novel CBE variants comprise novel combinations of mutant cytidine deaminases, such as the YE1, YE2, YEE, and R33A deaminases, and Cas9 domains, and/or novel combinations of mutant cytidine deaminases, Cas9 domains, uracil glycosylase inhibitor (UGI) domains and nuclear localizations sequence (NLS) domains. The suite of CBEs characterized and engineered herein collectively offer ˜10- to 100-fold lower average Cas9-independent off-target DNA editing, as well as ˜5- to 50-fold average lower Cas9-dependent off-target DNA editing, while maintaining robust on-target editing at most positions targetable by canonical CBEs. The novel CBEs of the present disclosure are especially promising for base editing applications in which off-target editing must be minimized, such as editing of genes that are highly expressed and genese associated with diseases or disorders, such as cancer.

[0011] The disclosed CBEs do not suffer from higher levels of other forms of undesired editing, in addition to exhibiting lower Cas9-independent off-target editing. The disclosed CBEs exhibit fewer insertions and/or deletions (indels), less Cas9-dependent DNA off-target editing, and less RNA off-target editing, following their use in methods of editing target sequences in nucleic acids.

[0012] The disclosed CBEs comprise fusion proteins comprising a cytidine deaminase fused to a catalytically impaired Cas9 protein and one or more copies of a UGI (1, 2). Deamination of cytosine within a base editing activity window (canonically, protospacer positions ˜4-8, counting the PAM as positions 21-23) in the single-stranded DNA loop displaced by the Cas9 guide RNA generates uracil, which is partially protected from base excision by the UGI. Selective nicking of the opposite DNA strand biases cellular DNA repair to replace the non-edited strand, resulting in the conversion of a target C:G base pair to a T:A base pair (1, 3, 4). CBEs have achieved high levels of nucleobase conversion with low levels of indels in numerous cell types and organisms, including animal models of human genetic diseases (4-8).

[0013] Like other Cas9-directed genome editing tools, base editors can bind to off-target genomic loci that have relatively high sequence homology (greater than about 60% sequence identity) to the target protospacer. A subset of these Cas9-dependent off-target binding events can lead to base editing (1, 9-11). Although typically a subset of off-target DNA modification by the corresponding Cas9 domain (1, 10, 12), Cas9-dependent off-target base editing can be minimized by using Cas9 variants with higher DNA specificity, and/or by delivering base editors as transient protein: RNA complexes, rather than expressing them from longer-lived DNA constructs (12).

[0014] The present disclosure is based, at least in part, on the finding that, in addition to Cas9-dependent off-target base editing, deamination from Cas9-independent binding of a base editor's deaminase domain to DNA represents a distinct type of off-target base editing.

[0015] Unlike Cas9-dependent off-target editing, Cas9-independent deamination occurs at different loci between samples, making it difficult to characterize by targeted high-throughput sequencing. Extensive whole-genome sequencing experiments such as those performed by Zuo et al. and Jin et al. are low-throughput and expensive, limiting their use for evaluating and engineering base editors with decreased Cas9-independent deamination activity. The present disclosure provides methods to efficiently evaluate the propensity of a base editor to cause Cas9-independent editing (i.e., Cas9-independent deamination) is described, as is the application of these methods to identify and engineer base editor variants that minimize Cas9-independent DNA editing. The described methods are suitable for use in prokaryotic cells such as E. coli, or eukaryotic cells such as mammalian cells.

[0016] Accordingly, the present disclosure provides assays for measuring the Cas9-independent off-target editing frequencies of base editors. Thus, provided herein are methods for determining the off-target effects of a base editor, wherein the methods comprise (a) contacting a nucleic acid molecule comprising a target sequence with a first complex, wherein the first complex comprises (i) a base editor comprising a Cas9 domain, and (ii) a first guide RNA that is engineered to bind to the Cas9 domain of the cytosine base editor, wherein the first guide RNA is complementary to the target sequence; (b) contacting the nucleic acid molecule with a second complex, wherein the second complex comprises (iii) a first nuclease inactive Cas9 (dCas9) protein, and (iv) a second guide RNA that is engineered to bind to the first dCas9 protein, wherein the second guide RNA is complementary to an off-target sequence, whereby the first complex and second complex create two or more R-loops in the nucleic acid molecule. The methods further include a step of (c) sequencing at least a portion of the target sequence and/or at least a portion of the nucleic acid molecule comprising the off-target sequence. The off-target sequence may comprise about 60% or less sequence identity to the target sequence. The methods may further comprise contacting the nucleic acid molecule with additional complexes (e.g., up to six complexes) that comprise a second dCas9 protein and a third guide RNA that is engineered to bind to the second dCas9 protein, wherein the third guide RNA is also complementary to the off-target sequence.

[0017] The step of contacting in the described method may include a step of transfecting the cell with one or more nucleic acid vectors (e.g. plasmids) encoding the base editor, the first guide RNA, the first dCas9 protein, the second guide RNA, the second dCas9 protein, and/or the third guide RNA. One or more of these molecules may be encoded on the same vector. The methods may be performed using lipofection, nucleofection, or electroporation, in a population of cells, such as mammalian cells.

[0018] In other aspects, the disclosure provides systems for determining off-target editing effects of a base editor that comprise one or more cells having i) a first nucleic acid molecule encoding a base editor comprising a Cas9 domain; (ii) a second nucleic acid molecule encoding a first guide RNA that is engineered to bind to the Cas9 domain of the base editor and is complementary to a target sequence; (iii) a third nucleic acid molecule encoding a dCas9 protein; and (iv) a fourth nucleic acid molecule encoding a second gRNA that is engineered to bind to the dCas9 protein, wherein the second guide RNA that is complementary to an off-target sequence. The off-target sequence may comprise about 60% or less sequence identity to the target sequence. The Cas9 domain may be derived from a first bacterial species (e.g., S. pyogenes Cas9, or SpCas9), and the dCas9 protein may be derived from a second bacterial species (e.g., S. aureus Cas9, or SaCas9). The Cas9 domain may comprise a Cas9 nickase. These systems and methods may be adapted for use in mammalian cells, such as human cells.

[0019] In another aspect, the present disclosure provides bacterial systems for determining off-target editing that comprise one or more prokaryotic (e.g., bacterial) cells comprising (i) a first nucleic acid molecule that contains a target sequence within a first inactive antibiotic resistance gene, wherein the target sequence within the first inactive antibiotic resistance gene contains a first mutant nucleotide base that yields an active antibiotic resistance gene conferring resistance to a first antibiotic when the first mutant nucleotide base is mutated to a different nucleotide base; (ii) a second nucleic acid molecule that contains a non-target sequence within a second inactive antibiotic resistance gene, wherein the non-target sequence within the second inactive antibiotic resistance gene contains a second mutant nucleotide base that yields an active antibiotic resistance gene conferring resistance to a second antibiotic when the second mutant nucleotide base is mutated to a different base; and (iii) a third nucleic acid molecule encoding a base editor and a guide RNA that is complementary to the target sequence within the first inactive antibiotic resistance gene. The present disclosure also provides assay methods in accordance with the described systems comprising contacting a prokaryotic cell that comprises the second nucleic acid molecule with (i) the first nucleic acid molecule, and (ii) the third nucleic acid molecule; and further contacting the prokaryotic cell with a growth medium comprising the second antibiotic and/or the first antibiotic.

[0020] In other aspects, the disclosure provides novel CBEs that exhibit reduced off-target base editing frequencies (such as Cas9-independent off-target editing) while maintaining high on-target editing efficiencies. The described base editors may comprise a cytidine deaminase selected from YE1, YE2, YEE, EE, R33A, R33A+K34A, AALN, APOBEC3A (A3A and eA3A), or APOBEC3G (A3G), and variants thereof, as well as one or more nuclear localization signals and two or more uracil glycosylase inhibitor (UGI) domains. In some embodiments, the disclosed cytosine base editors comprise evolved nucleic acid programmable DNA binding proteins (napDNAbp), such as an evolved Cas9. In some embodiments, the disclosed CBEs recognize an expanded PAM and/or make edits in a narrower target window. In certain embodiments, the cytidine deaminase domain is selected from R33A, YE1, YE2, YEE, or EE, or a variant thereof, and the napDNAbp domain is selected from an nCas9, an xCas9, an SpCas9-NG, or a CP1028. In some embodiments, the napDNAbp domain is selected from any one of the amino acid sequences set forth in SEQ ID NOs: 213-229 or 235-237. Exemplary base editors may comprise any one of the amino acid sequences set forth in SEQ ID NOs: 257-282.

[0021] In other aspects, the disclosure provides methods of editing a target nucleobase pair in a nucleic acid molecule (or substrate) that result in low off-target editing frequencies, such as low Cas9-independent off-target editing frequencies. Cytosine base editors with Cas9-dependent off-target editing frequencies of about 2.0% to about 15% were recently described in Huang, T. P., et al., Nat. Biotechnol. 37, 626-631 (2019), incorporated herein by reference. And CBEs with apparent on-target editing efficiencies in vivo of about 50% have been described in International Application No PCT/US2019/033848, published as WO/2019/226953 on Nov. 28, 2019, and Komor et al., Sci. Adv. 2017; 3:eaao4774, each of which is incorporated herein by reference. The methods described herein comprise contacting a target sequence in a nucleic acid molecule with any one of the base editors described herein associated with a guide RNA (gRNA), obtaining a successful edit (e.g., deaminating a cytosine in the case of cytosine base editors, or deaminating an adenine in the case of adenine base editors) in a target nucleobase pair within the target sequence, and obtaining a frequency (such as an average frequency) of off-target editing of less than 1.5% (such as less than 1.25%, less than 1.0%, less than 0.75%, or less than 0.5%). These methods may further comprise obtaining an on-target editing efficiency (i.e., a frequency of intended deamination of a cytosine in the target nucleobase pair) of greater than 50% (such as greater than 60%, greater than 70%, or greater than 85%) at the target nucleobase pair. These methods may further comprise obtaining an on-target editing efficiency of greater than 50% and a frequency of off-target editing of less than 1.5%. These methods may further comprise obtaining an on-target editing efficiency of greater than 60% and a frequency of off-target editing of less than 0.75%. The editing efficiencies and off-target editing frequencies described herein may be determined by performing high-throughput sequencing of the nucleic acid substrates at the appropriate target site(s) and known off-target site(s) following the step of contacting the nucleic acid molecule with the base editor of interest. This step of performing high-throughput sequencing may include a whole genome sequencing (WGS) step.

[0022] The step of contacting a nucleic acid molecule of the disclosed methods may be performed in vivo, such as at a target sequence in the genome of a subject, such as a human. In some embodiments, the subject is a non-human animal, such as a non-human mammal. The step of contacting may be performed in vitro, such as in a cell. In some embodiments, the step of contacting is performed in a mammalian cell, such as a non-human cell. In some embodiments, the step of contacting is performed in cells derived from a non-human animal.

[0023] In other aspects, the disclosure provides polynucleotides and vectors comprising a polynucleotide encoding any of the novel base editors described herein. The disclosure also provides complexes containing any one of the CBEs described herein in association with a gRNA. The disclosure further provides cells (such as mammalian cells) comprising any of the CBEs described herein, polynucleotides, vectors, or complexes.

[0024] In other aspects, the disclosure provides pharmaceutical compositions comprising the described base editors. The disclosed pharmaceutical compositions may comprise any of the described base editors and a pharmaceutically acceptable excipient, and optionally a guide RNA (gRNA).

[0025] The present disclosure further provides kits for use of the base editors described herein in targeted nucleic acid editing, as well as kits for use of evaluating the off-target effects of these base editors. The disclosed kits for use of the described base editors in nucleic acid editing may comprise a nucleic acid construct comprising nucleotide sequences encoding any one of the disclosed base editors and one or more gRNAs having complementarity to a target sequence.

[0026] Further disclosed herein are kits for performing the methods of evaluating off-target effects, as described herein. Exemplary such kits comprise nucleic acid constructs including (i) a nucleic acid sequence encoding a cytosine base editor as described herein; (ii) a nucleic acid sequence encoding a first gRNA that is engineered to bind to the Cas9 domain of the cytosine base editor and is complementary to a target sequence of interest; (iii) a nucleic acid sequence encoding a first dCas9 protein; and (iv) a nucleic acid sequence encoding a second gRNA that is engineered to bind to the dCas9 protein and is complementary to an off-target sequence.

[0027] In some aspects, the base editors described herein may be administered to a subject to treat a disease or disorder. Thus, methods are provided wherein the described CBEs are administered to a subject, and a target sequence in the genome of the subject is edited with high on-target frequency and reduced Cas9-independent off-target frequency. The target sequence may comprise a mutant C:G base pair, e.g., a mutant C:G base pair associated with a disease or disorder.

[0028] The disclosure further provides uses of any one of the base editors described herein and a guide RNA targeting this base editor to a target C:G base pair in a nucleic acid molecule in the manufacture of a kit for nucleic acid editing, wherein the nucleic acid editing comprises contacting the nucleic acid molecule with the base editor and guide RNA under conditions suitable for the deamination of the cytosine (C) of the C:G nucleobase pair. The disclosure further provides uses of any one of the base editors described herein and a guide RNA targeting this base editor to a target C:G base pair in a nucleic acid molecule in the manufacture of a kit for evaluating the off-target effects of the base editor.

[0029] It should be appreciated that the foregoing concepts, and additional concepts discussed below, may be arranged in any suitable combination, as the present disclosure is not limited in this respect. Further, other advantages and novel features of the present disclosure will become apparent from the following detailed description of various non-limiting embodiments when considered in conjunction with the accompanying figures.

### BRIEF DESCRIPTION OF THE DRAWINGS

[0030] FIGS. 1A-1C show on-target and Cas9-independent off-target DNA editing in E. coli. FIG. 1A is a schematic of the experimental design for the prokaryotic cell assays of the disclosure. FIG. 1B is a graph showing assay validation for on-target and off-target (indicated with the “#” symbol) DNA editing. The fraction of resistant colonies was calculated relative to the number of E. coli plated on maintenance antibiotics. Data are shown as individual data points and mean±SEM for n=3 or n=15 bacterial colonies. E63A refers to a catalytically inactivated APOBEC1 E63A mutant. FIG. 1C is a graph showing the performance of CBEs that use alternative deaminases. All constructs are of the deaminase-dCas9-UGI (BE2) architecture. The dotted line indicates the background level of rifampin resistance of the inactive APOBEC1 E63A deaminase control. Data are shown as individual data points and mean±SEM for n=3 or n=15 bacterial colonies.

[0031] FIGS. 2A-2E show Cas9-independent deamination by cytosine base editors (CBEs) in HEK293T cells. FIG. 2A is a schematic showing the BE4max-like architecture for CBE constructs used in mammalian cell experiments. FIG. 2B is a schematic of the experimental design for the eukaryotic cell assays of the disclosure. The cytidine deaminase domain of a CBE containing S. pyogenes Cas9 (SpCas9) nickase deaminate cytosines within R-loops generated by isolated dead S. aureus Cas9 (dSaCas9) in a Cas9-independent manner. R-loops are generated by isolated dSaCas9 at known off-target sites by virtue of the hybridization to these sites of “off-target” guide RNAs that are engineered to bind SaCas9 specifically. Meanwhile, the SpCas9 nickase domain of the CBE generates an R-loop at the target site by virtue of the hybridization to the target site of an on-target guide RNA that is engineered to bind SpCas9 specifically. The two uracil glycosyase inhibitor (UGI) domains of exemplary CBEs are also shown. FIG. 2C and FIG. 2D are collections of graphs showing Cas9-independent off-target C:G-to-T:A editing frequencies detected by targeted high-throughput sequencing of six dSaCas9 loci following co-transfection with SpCas9-targeted CBEs. Each subplot shows the observed C:G-to-T:A conversion of a single underlined cytosine and its immediate sequence context. Transfections in FIG. 2C were performed with one of two SpCas9 sgRNAs (targeting the RNF2 or EMX1 genomic loci) or no SpCas9 sgRNA, with on-target editing controls shown in FIG. 7A. Transfections in FIG. 2D were performed with one SpCas9 sgRNA targeting the RNF2 genomic locus, with on-target editing controls shown in FIG. 7B. For FIG. 2C and FIG. 2D, data are shown as individual data points and means±SEM for n=3 independent biological replicates performed on different days. FIG. 2E is a schematic showing the mechanism by which “off-target” guide RNAs may bind SaCas9 specifically, while on-target guide RNAs may bind SpCas9 specifically. Guide RNAs may be engineered so that their backbone (or “core”) sequences (the stem-loop portions of the RNA molecules shown) can be modified to interact with a binding pocket present in an SpCas9 protein or SaCas9 protein. The gRNA that is specific for the SpCas9 protein (light blue) does not interact with the binding pocket of the SaCas9 protein (red), and vice versa.

[0032] FIGS. 3A-3D show that YE1 balances efficient on-target editing with greatly decreased Cas9-independent editing as confirmed by whole-genome sequencing (WGS). FIG. 3A shows on-target editing versus average off-target editing for all CBEs in this study. The y-axis reflects the mean on-target control editing at the on-target RNF2 locus used in the orthogonal R-loop assay, and the x-axis reflects the mean off-target editing for six orthogonal R loops. The box indicates CBE variants that have substantially decreased Cas9-independent off-target editing but retain appreciable on-target activity. See FIGS. 8A-8D and FIG. 2D for mean values and SEM at individual sites. FIG. 3B shows the average maximum on-target and average off-target editing for constructs with decreased Cas9-independent editing events. The y-axis reflects average editing across six on-target protospacers of the most highly edited cytosine within that protospacer. The x-axis reflects the average off-target editing in the orthogonal R-loop assay. See FIG. 13 and FIG. 2D for mean values and SEM at individual sites. FIG. 3C shows the number of C•G-to-T•A single-nucleotide variants (SNVs) relative to the initial parent sample detected by whole-genome sequencing (WGS). The fraction of cytosine base SNVs that can be targeted for editing with either of the indicated CBEs are indicated with the “#” and “*” symbols. FIG. 3D shows the total number of SNVs relative to the initial parent sample detected by WGS. Each dot (•) represents the number of SNPs called in a clonal population of cells relative to the parent sample. Each clonal population was derived from a single GFP-positive cell that was isolated after flow cytometry sorting of HEK293T cells transfected with a CBE-P2A-GFP construct for the GFP-positive cells. Horizontal lines and error bars indicate mean number of SNVs±SEM for n=8 (BE4 and YE1) or n=7 (Cas9 nickase). P values were calculated using the Mann-Whitney U test. **p<0.005; ***p<0.0005.

[0033] FIG. 4 shows the Sanger sequencing of the rpoB gene from rifampin-resistant E. coli colonies. Sanger sequencing traces from three unique rifampin-resistant colonies that showed different C:G to T:A mutations. Top to bottom, left to right the sequences correspond to SEQ ID NOs: 1-15.

[0034] FIGS. 5A-5B show an analysis of point mutations (single nucleotide variations, or SNVs) reported by Zuo et al. (13). The sequence context of C•G-to-T•A SNVs identified by Zuo et al. in BE3-treated mouse embryos, as shown in FIG. 5A, or Cas9-, Cre-, and ABE-treated mouse embryos, as shown in FIG. 5B, is shown as sequence logos. Using the genomic locations of all C:G-to-T:A SNVs reported by Zuo et al., the flanking sequences (20 base pairs on either side) were extracted from the mouse mm10 reference genome [GCA_000001635.2].

[0035] FIG. 6 shows the relationship between on-target editing and off-target editing for rifampin resistance assay in bacteria. Mean values are plotted for both on-target and off-target editing and were calculated as the number of resistant bacteria relative to the number of bacteria plated on maintenance antibiotics. Replicates used for this calculation are shown in FIG. 1C.

[0036] FIGS. 7A-7B show the on-target DNA editing controls in HEK293T cells. On-target DNA base editing efficiencies at the appropriate genomic loci corresponding to the SpCas9 sgRNAs included in the dSaCas9+ SpCas9-targeted CBE co-transfection experiments in FIG. 2C's RNF2 and EMX1 sites, as shown in FIG. 7A, and FIG. 2D's RNF2 site, as shown in FIG. 7B. The on-target editing efficiency for each SpCas9-targeted CBE when combined with each of the six R-loop-generating SaCas9 sgRNAs was determined by high-throughput sequencing to ensure that any absence of SpCas9-independent off-target editing was not due to lack of CBE expression or poor transfection efficiency. Data are shown for a single cytosine (C6) in the editing window as individual data points and mean values±SEM for n=3 biological replicates performed at different times.

[0037] FIGS. 8A-8D show the in vitro characterization of CBEs. FIG. 8A shows the denaturing PAGE gel of purified CBEs. Purified proteins from left to right are APOBEC1-dCas9-UGI (APO1), YE1-dCas9-UGI (YE1), and APOBEC3A-dCas9-UGI (A3A). FIG. 8B shows the representative denaturing PAGE gel of in vitro deamination reaction products following incubation with base editors (CBEs) at the denoted concentrations and treatment with USER enzyme. The reactions shown were performed with 25 μM ssDNA substrate for 30 minutes. ‘C’ refers to the substrate-only control (with no CBE added), and ‘U’ refers to the positive control with a uracil synthetically incorporated in place of the single cytosine in the ssDNA oligonucleotide. FIG. 8C shows a Michaelis-Menten kinetic analysis of in vitro deamination reaction rates determined by calculating the ratio of the intensities of the cleaved product and substrate bands by gel densitometry. Data are shown as mean values±SD for three technical replicates. FIG. 8D shows the calculated values for kinetic parameters from non-linear regression using the Michaelis-Menten equation.

[0038] FIGS. 9A-9C show the intracellular deamination of a co-transfected ssDNA oligonucleotide by CBE variants in HEK293T cells. FIG. 9A is a graph showing the observed deamination levels detected by high-throughput sequencing at all 5′ TC cytosines within a co-transfected ssDNA oligonucleotide in HEK293T cells. FIG. 9B is a scatter plot of mean deamination levels for the twelve cytosines shown in FIG. 9A. FIG. 9C is a graph showing on-target genomic DNA C:G-to-T:A editing controls at C6 of the HEK2 locus. Data are shown as individual data points and mean values±SEM for n=3 biological replicates performed at different times.

[0039] FIGS. 10A-10B show the Cas9-independent off-target editing and on-target editing as well as the cytosine base editors targeted with SpCas9-NG in HEK293T cells. FIG. 10A is a collection of graphs showing off-target editing of BE4-like constructs modified with SpCas9-NG at R-loops generated by dSaCas9 and one of six SaCas9 sgRNAs. FIG. 10B is a collection of graphs showing the on-target editing controls at C6 of the RNF2 locus. Data are shown as individual data points and mean values±SEM for n=3 biological replicates performed at different times by different researchers.

[0040] FIG. 11 shows on-target base editing by circularly permuted CBE variants in HEK293T cells. This data is summarized in the heat map of FIG. 3B. Data are shown as individual data points and mean values±SEM for n=3 biological replicates performed at different times.

[0041] FIGS. 12A-12D show the base editing activity windows for BE4max, YE1max, and YE1-CP1028 in HEK293T cells. FIG. 12A shows the mean editing at various cytosines across six sites tested were grouped by the position of the cytosine within the protospacer (counting the PAM as positions 21-23) and averaged. FIG. 12B shows the same data as in FIG. 12A, but is normalized to peak editing at a given site. For each edited cytosine, the editing efficiency was divided by the editing efficiency of the most highly edited cytosine within that protospacer. FIG. 12C is a table showing the number of cytosines analyzed for each window position. FIG. 12D shows the on-target editing at a single protospacer that contains a multi-C repeat. “YE1max” refers to a BE4max architecture comprising a YE1 deaminase domain.

[0042] FIG. 13 shows on-target editing by R33A+K34A-BE4 and AALN-BE4 in HEK293T cells. (“AALN” refers to the R33A+K34A+H122L+D124N variant of rAPOBEC1.) Data are shown as individual data points and mean values±SEM for n=3 biological replicates performed at different times.

[0043] FIGS. 14A-14C are graphs showing that AALN shows minimal Cas9-independent off-target editing in E. coli or mammalian cells. FIG. 14A shows the Rifampin assay for AALN-BE2 compared to a catalytically inactivated APOBEC1 E63A mutant base editor. Data are shown as individual data points and mean values±SEM for n=3 bacterial colonies. Bars representing colonies in which off-target editing occurred are indicated with the * symbol. FIG. 14B shows the on-target editing efficiency for the RNF2 locus in HEK293T cells using various SaCas9 sgRNAs to create an orthogonal R-loop. Data are shown as individual data points and mean values±SEM for n=3 biological replicates performed at different times. FIG. 14C shows off-target data editing of AALN-BE4 in HEK293T cells compared to a no-editor control and to R33A+K34-BE4. On-target editing data for R33A+K34A-BE4 and for the no-editor control are in FIGS. 7A-7B. Data are shown as individual data points and mean values±SEM for n=3 biological replicates performed at different times.

[0044] FIGS. 15A-15B show that circularly-permuted CBE variants show minimal Cas9-independent off-target editing in HEK293T cells. FIG. 15A is a collection of graphs showing SpCas9-independent off-target editing of BE4-CP1028 constructs (which use the circularly permuted SpCas9-CP1028 for targeting) at six R-loops created by dSaCas9 and one or more of the sgRNAs engineered to bind S. aureus. FIG. 15B shows the on-target editing controls at C6 of the RNF2 locus. Data are shown as individual data points and mean values±SEM for n=3 biological replicates performed at different times by different researchers.

[0045] FIG. 16 is a collection of graphs which show CBEs with minimal Cas9-independent off-target editing show low levels of indel formation in HEK293T cells. Data are shown as individual data points and mean values±SEM for n=3 biological replicates performed on different days by different researchers.

[0046] FIG. 17 is a collection of graphs which show CBEs with minimal Cas9-independent off-target DNA editing show reduced levels of Cas9-dependent off-target DNA editing in HEK293T cells. The 20 sites shown are the 20 most highly edited off-target substrates of SpCas9 and the EMX1, HEK3, or HEK4 sgRNAs by GUIDE-seq (42). Individual data points and mean values±SEM for n=3 biological replicates performed on different days by different researchers are shown.

[0047] FIGS. 18A-18D are graphs showing the protein delivery of the base editor reduces off-target editing while maintaining robust on-target editing in HEK293T cells. FIG. 18A shows off-target editing of BE4 delivered into HEK293T cells as either plasmid or protein, with an on-target SpCas9 sgRNA targeting the RNF2 locus. Individual data points and mean values±SEM for n=3 biological replicates performed at different times are shown. FIG. 18B shows off-target editing of BE4 delivered into HEK293T cells as either plasmid or protein, with an on-target SpCas9 sgRNA targeting the EMX1 locus. Data are shown as individual data points and mean values±SEM for n=3 biological replicates performed at different times. FIG. 18C shows on-target editing controls for the HEK3 off-target analysis. Data is shown as mean±SEM for n=3 biological replicates performed at different times. FIG. 18D shows on-target editing controls for the FANCF off-target analysis. Data is shown as mean±SEM for n=3 biological replicates performed at different times.

[0048] FIGS. 19A-19D show that YE1 balances efficient on-target editing with greatly decreased Cas9-independent editing as confirmed by whole genome sequencing (WGS). FIG. 19A is a graph showing on-target editing versus average off-target editing for all CBEs. The y-axis reflects the mean on-target control editing at the on-target RNF2 locus used in the orthogonal R-loop assay, and the x-axis reflects the mean off-target editing for six orthogonal R loops. The box indicates CBE variants that have substantially decreased Cas9-independent off-target editing but retain appreciable on-target activity. See FIGS. 8A-8D and FIG. 2D for mean values and SEM at individual sites. FIG. 19B shows the average maximum on-target and average off-target editing for constructs with decreased Cas9-independent editing events. The y-axis reflects average editing across six on-target protospacers of the most highly edited cytosine within that protospacer. The x-axis reflects the average off-target editing in the orthogonal R-loop assay. See FIG. 13 and FIG. 2D for mean values and SEM at individual sites. FIG. 19C shows the number of C•G-to-T•A single-nucleotide variants (SNVs) relative to the initial parent sample detected by WGS. FIG. 19D shows the total number of SNVs relative to the initial parent sample detected by WGS. For both FIGS. 19C and 19D, each dot represents the number of SNPs called in a clonal population of cells relative to the parent sample. Each clonal population was derived from a single GFP-positive cell that was isolated after flow sorting HEK293T cells transfected with a CBE-P2A-GFP construct for the GFP-positive cells. Horizontal lines and error bars indicate mean number of SNVs±SEM for n=8 (BE4 and YE1) or n=7 (Cas9 nickase). P values were calculated using the Mann-Whitney U test. **p<0.005; ***p<0.0005.

[0049] FIGS. 20A-20B show the HSV thymidine kinase resistance assay. FIG. 20A shows the fraction of dP-resistant colonies was calculated relative to number of E. coli plated on maintenance antibiotics. All constructs are in the deaminase-dCas9-UGI (BE2) architecture, except BE1 and BE1(E63A), both of which lack UGI, and the UGI only construct. Data are shown as individual data points and mean±SEM for n=3 bacterial colonies. FIG. 20B shows Sanger sequencing traces from four unique dP-resistant colonies that showed different C•G-to-T•A mutations that inactivate the integrated HSV thymidine kinase gene.

[0050] FIG. 21 shows HEK293T cell viability 48 or 72 hours post transfection as measured by luminescence using the CellTiter-Glo assay (Promega). Data are shown as individual data points and mean values±SEM for n=3 independent biological replicates.

[0051] FIGS. 22A-22F show Cas9-independent off-target editing by ABE. FIG. 22A shows the Rifampin assay for ABE (tadA-tadA*-dCas9) compared to BE2 (APOBEC1-dCas9-UGI) and BE1(E63A) (APOBEC1(E63A)-dCas9). The defective chloramphenicol acetyltransferase gene used to assess ABE on-target editing contained an inactivating G•C-to-A•T mutation rather than an inactivating T•A-to-C•G mutation. Both C•G-to-T•A and A•T-to-G•C mutations in the rpoB gene render E. coli resistant to rifampin (17). Data are shown as individual data points and mean values±SEM for n=3 bacterial colonies. Bars representing colonies in which off-target editing occurred are indicated with the * symbol. FIG. 22B shows HSV thymidine kinase assay for ABE compared to BE2 and BE1 (E63A). Data are shown as individual data points and mean values±SEM for n=3 bacterial colonies. FIG. 22C shows intracellular deamination of a co-transfected ssDNA oligonucleotides by ABEmax in HEK293T cells. Each data point represents the detected A-to-G conversion of a specific A in the oligonucleotide, and is the mean of n=3 biological replicates performed at different times. FIG. 22D shows on-target genomic DNA A•T-to-G•C editing controls at A₅ of the HEK2 locus. FIG. 22E shows off-target editing by ABEmax at R-loops created by dSaCas9 and one of six SaCas9 sgRNAs. FIG. 22F shows on-target editing controls at A₅ of the HEK2 locus. (Bars representing reads for which no editor was present are indicated with the * symbol.) In FIGS. 22D-22F, data are shown as individual data points and mean values±SEM for n=3 biological replicates performed at different times.

[0052] FIGS. 23A-23B show on-target and off-target editing profiles of CBEs. FIG. 23A shows the ratio of on-target control editing at the RNF2 locus to the average off-target editing across the six SaCas9 R loops tested. Each bar is the quotient of mean on-target control RNF2 editing/the mean off-target editing at all 18 cytosines tested in the orthogonal R-loop assay. Individual values used in these calculations are shown in FIGS. 2A-2D and FIGS. 8A-8D. FIG. 23B shows on-target editing across the six genomic loci for CBEs with low Cas9-independent off-target editing. Data are shown as individual data points and mean values±SEM for n=3 biological replicates performed at different times.

[0053] FIG. 24 shows the on-target controls for WGS samples. On-target sequencing of RNF2 locus of bulk populations after flow sorting is also shown.

[0054] FIGS. 25A-25B show the number of SNVs detected by WGS relative to the initial parent sample, separated by type of mutation. FIG. 25A shows the total number of SNVs of each type present in each sample. FIG. 25B shows a fraction of total SNPs in each sample that were a certain type of SNP. The fraction of total SNPs targeted for editing with the BE4 and YE1-BE4 editors are indicated with the “#” and “*” symbols, respectively. In both FIG. 25A and FIG. 25B, each dot represents the number of SNPs called in a clonal population of cells relative to the parent sample. Each clonal population was derived from a single GFP-positive cell that was isolated after flow sorting HEK293T cells transfected with a P2A-GFP construct of the designated editor. Lines indicate mean number of SNPs±SEM for n=8 (BE4 and YE1) or n=7 (nickase).

[0055] FIGS. 26A-26C show CBEs with minimal Cas9-independent off-target DNA editing show reduced levels of Cas9-independent RNA editing in HEK293T cells. FIG. 26A shows the average % C-to-U off-target RNA editing among cytosines within a transcript. Individual data points and mean values±SEM for n=3 biological replicates performed on different days are shown. Each replicate is the mean C-to-U editing across all of the cytosines of the specified transcript. FIG. 26B shows the number of cytosines with off-target RNA editing per transcript. Individual data points and mean values±SEM for n=3 biological replicates performed on different days are shown. Each replicate is the number of cytosines edited at a rate of 0.1% or higher within the designated transcript. FIG. 26C shows the editing of all 154 cytosines examined across the three transcripts. Each dot show the mean editing value of one specific cytosine, across three biological replicates performed on different days.

[0056] FIG. 27 shows CBE protein expression levels. Western blot analysis of HEK293T cell lysates 48 hours post transfection with plasmids encoding CBEs and an on-target sgRNA. Following membrane transfer, the top and bottom halves of the membrane were separated and processed separately (i.e. with different primary antibodies) but were imaged simultaneously. GAPDH was used as a loading control. Cell lysates were obtained from two biological replicates performed at different times.

[0057] FIG. 28 shows fluorescence-activated cell sorting (FACS) gating and data for a negative control (GFP-negative) HEK293T cell sample in order to subsequently gate for GFP-positive populations. Populations of cells gated for various events are indicated by symbols and shading.

[0058] FIG. 29 shows FACS gating and data for HEK293T cells transfected with a plasmid encoding YE1-P2A-GFP and a plasmid encoding an RNF2-targeting sgRNA. P4 shows gating for all GFP-positive cells, and P5 shows gating for the top ˜25% of GFP-positive cells. Populations of cells gated for various events are indicated by symbols and shading.

[0059] FIG. 30 shows FACS gating and data for HEK293T cells transfected with a plasmid encoding BE4-P2A-GFP and a plasmid encoding an RNF2-targeting sgRNA. Gates were maintained at the same locations as described above. Populations of cells gated for various events are indicated by symbols and shading.

[0060] FIG. 31 shows FACS gating and data for HEK293T cells transfected with a plasmid encoding Cas9(D10A)-P2A-GFP and a plasmid encoding an RNF2-targeting sgRNA. Gates were maintained at the same locations as described above. Populations of cells gated for various events are indicated by symbols and shading.

### DEFINITIONS

[0061] As used herein and in the claims, the singular forms “a,” “an,” and “the” include the singular and the plural reference unless the context clearly indicates otherwise. Thus, for example, a reference to “an agent” includes a single agent and a plurality of such agents.

[0062] “Base editing” is a genome editing technology that involves the conversion of a specific nucleic acid base (or nucleobase) into another at a targeted genomic locus. In certain embodiments, this can be achieved without requiring double-stranded DNA breaks (DSB). To date, other genome editing techniques, including CRISPR-based systems, begin with the introduction of a DSB at a locus of interest. Subsequently, cellular DNA repair enzymes mend the break, commonly resulting in random insertions or deletions (indels) of bases at the site of the DSB. However, when the introduction or correction of a point mutation at a target locus is desired rather than stochastic disruption of the entire gene, these genome editing techniques are unsuitable, as correction rates are low (e.g., typically 0.1% to 5%), with the major genome editing products being indels. In order to increase the efficiency of gene correction without simultaneously introducing random indels, the present inventors previously modified the CRISPR/Cas9 system to directly convert one DNA base into another without DSB formation. See Komor, A. C., et al., Programmable editing of a target base in genomic DNA without double-stranded DNA cleavage. Nature 533, 420-424 (2016), which is incorporated by reference herein.

[0063] In principle, there are 12 possible base-to-base changes that may occur via individual or sequential use of transition (i.e., a purine-to-purine change or pyrimidine-to-pyrimidine change) or transversion (i.e., a purine-to-pyrimidine or pyrimidine-to-purine) editors. These include transition base editors such as the cytosine base editor (“CBE”), also known as a C-to-T base editor (or “CTBE”). This type of editor converts a C:G Watson-Crick nucleobase pair to a T:A Watson-Crick nucleobase pair. Because the corresponding Watson-Crick paired bases are also interchanged as a result of the conversion, this category of base editor may also be referred to as a guanine base editor (“GBE”) or G-to-A base editor (or “GABE”). Other transition base editors include the adenine base editor (or “ABE”), also known as an A-to-G base editor (“AGBE”). This type of editor converts an A:T Watson-Crick nucleobase pair to a G:C Watson-Crick nucleobase pair. Because the corresponding Watson-Crick paired bases are also interchanged as a result of the conversion, this category of base editor may also be referred to as a thymine base editor (or “TBE”) or T-to-G base editor (“TGBE”).

[0064] The term “base editors (BEs),” as used herein, refers to fusion proteins comprising protein domains from at least two proteins that are capable of editing nucleobase, and comprise the fusion proteins described herein. In some embodiments, the disclosed base editors comprise a nuclease-inactive Cas9 (dCas9) fused to a deaminase which binds a nucleic acid in a guide RNA-programmed manner via the generation of an R-loop but does not cleave the nucleic acid. For example, the dCas9 domain of a disclosed base editor may include both D10A and H840A mutations. In other embodiments, the disclosed base editors comprise a Cas9 nickase (nCas9) fused to a deaminase. The nCas9 domain of a disclosed base editor may include a D10A or an H840A mutation (which renders the Cas9 domain capable of cleaving only one strand of a nucleic acid duplex), as described in PCT/US2016/058344, filed on Oct. 22, 2016, and published as WO 2017/070632 on Apr. 27, 2017), which is incorporated herein by reference. The DNA cleavage domain of S. pyogenes Cas9 includes two subdomains, the HNH nuclease subdomain and the RuvC1 subdomain. The HNH subdomain cleaves the strand complementary to the gRNA (the “targeted strand,” or the strand at which editing or deamination occurs), whereas the RuvC1 subdomain cleaves the non-complementary strand containing the PAM sequence (the “non-targeted strand”, or the strand at which editing or deamination does not occur). The RuvC1 nCas9 mutant D10A generates a nick on the targeted strand, while the HNH nCas9 mutant H840A generates a nick on the non-targeted strand (see Jinek et al., Science 337:816-821(2012); Qi et al., Cell 28; 152(5):1173-83 (2013))

[0065] In some embodiments, the base editor comprises a Cas9 nickase fused to a deaminase, e.g., a deaminase which converts a cytosine nucleobase to a thymine. The term “base editors” encompasses the base editors described herein as well as any base editor known or described in the art at the time of this filing or developed in the future. Reference is made to Rees & Liu, Base editing: precision chemistry on the genome and transcriptome of living cells, Nat Rev Genet. 2018; 19(12):770-788 and Koblan et al., Nat Biotechnol. 2018; 36(9):843-846; as well as U.S. Patent Publication No. 2018/0073012, published Mar. 15, 2018, which issued as U.S. Pat. No. 10,113,163; on Oct. 30, 2018; U.S. Patent Publication No. 2017/0121693, published May 4, 2017, which issued as U.S. Pat. No. 10,167,457 on Jan. 1, 2019; International Publication No. WO 2017/070633, published Apr. 27, 2017; International Publication No. WO 2018/027078, published Aug. 2, 2018; International Application No PCT/US2018/056146, filed Oct. 16, 2018, which published as Publication No. WO 2019/079347 on Apr. 25, 2019; International Application No PCT/US2019/033848, filed May 23, 2019, which published as Publication No. WO 2019/226593 on Nov. 28, 2019; U.S. Patent Publication No. 2015/0166980, published Jun. 18, 2015; U.S. Pat. No. 9,840,699, issued Dec. 12, 2017; U.S. Pat. No. 10,077,453, issued Sep. 18, 2018; International Publication No. WO 2019/023680, published Jan. 31, 2019; International Publication No. WO 2018/0176009, published Sep. 27, 2018; International Application No. PCT/US2019/47996, filed Aug. 23, 2019, which published as International Publication No. WO 2020/041751 on Feb. 27, 2020; International Publication No. WO 2020/051360, published Mar. 12, 2020; International Patent Publication No. WO 2020/102659, published May 22, 2020; International Publication No. WO 2020/086908, published Apr. 30, 2020; International Publication No. WO 2020/181180, published Sep. 10, 2020; International Publication No. WO 2020/214842, published Oct. 22, 2020; International Publication No. WO 2020/092453, published May 7, 2020 and International Patent Application No. PCT/US2020/033873, filed May 20, 2020, the contents of each of which are incorporated herein by reference in their entireties.

[0066] The term “Cas9” or “Cas9 nuclease” or “Cas9 domain” refers to a CRISPR associated protein 9, or variant thereof, and embraces any naturally occurring Cas9 from any organism, any naturally-occurring Cas9, any Cas9 homolog, ortholog, or paralog from any organism, and any variant of a Cas9, naturally-occurring or engineered. More broadly, a Cas9 protein, domain, or moiety is a type of nucleic acid programmable D/RNA binding protein (napR/DNAbp),” or more specifically, a “nucleic acid programmable DNA binding protein (napDNAbp)”. The term Cas9 is not meant to be limiting and may be referred to as a “Cas9 or variant thereof.” Exemplary Cas9 proteins are described herein and also described in the art. The present disclosure is unlimited with regard to the particular Cas9 that is employed in the base editors of the invention.

[0067] In some embodiments, proteins comprising Cas9 or fragments thereof are referred to as “Cas9 variants.” A Cas9 variant shares homology to Cas9, or a fragment thereof. Cas9 variants include functional fragments of Cas9. For example, a Cas9 variant is at least about 70% identical, at least about 80% identical, at least about 90% identical, at least about 95% identical, at least about 96% identical, at least about 97% identical, at least about 98% identical, at least about 99% identical, at least about 99.5% identical, or at least about 99.9% identical to wild type Cas9. In some embodiments, the Cas9 variant may have 1, 2, 3, 4, 5, 6, 7, 8, 9, 10, 11, 12, 13, 14, 15, 16, 17, 18, 19, 20, 21, 22, 21, 24, 25, 26, 27, 28, 29, 30, 31, 32, 33, 34, 35, 36, 37, 38, 39, 40, 41, 42, 43, 44, 45, 46, 47, 48, 49, 50, or more amino acid changes compared to a wild type Cas9. In some embodiments, the Cas9 variant comprises a fragment of Cas9 (e.g., a gRNA binding domain or a DNA-cleavage domain), such that the fragment is at least about 70% identical, at least about 80% identical, at least about 90% identical, at least about 95% identical, at least about 96% identical, at least about 97% identical, at least about 98% identical, at least about 99% identical, at least about 99.5% identical, or at least about 99.9% identical to the corresponding fragment of wild type Cas9. In some embodiments, the fragment is at least 30%, at least 35%, at least 40%, at least 45%, at least 50%, at least 55%, at least 60%, at least 65%, at least 70%, at least 75%, at least 80%, at least 85%, at least 90%, at least 95% identical, at least 96%, at least 97%, at least 98%, at least 99%, or at least 99.5% of the amino acid length of a corresponding wild type Cas9.

[0068] As used herein, the term “dCas9” refers to a nuclease-inactive Cas9 or nuclease-dead Cas9, or a variant thereof, and embraces any naturally occurring dCas9 from any organism, any naturally-occurring dCas9 equivalent, any dCas9 homolog, ortholog, or paralog from any organism, and any mutant or variant of a dCas9, naturally-occurring or engineered. The term dCas9 is not meant to be particularly limiting and may be referred to as a “dCas9 or equivalent.” Exemplary dCas9 proteins and methods for making dCas9 proteins are further described herein and/or are described in the art and are incorporated herein by reference.

[0069] As used herein, the term “nCas9” or “Cas9 nickase” refers to a Cas9 or a variant thereof, which cleaves or nicks only one of the strands of a target cut site thereby introducing a nick in a double strand DNA molecule rather than creating a double strand break. This can be achieved by introducing appropriate mutations in a wild-type Cas9 which inactives one of the two endonuclease activities of the Cas9. Any suitable mutation which inactivates one Cas9 endonuclease activity but leaves the other intact is contemplated, such as one of D10A or H840A mutations in the wild-type Cas9 amino acid sequence may be used to form the nCas9. In various embodiments, the D10A mutation is used to form the nCas9 (e.g., SEQ ID NO: 215).

[0070] The term “circularly permuted Cas9” refers to a Cas9 protein, or variant thereof, that occurs as a circular permutant, whereby its N- and C-termini have been topically rearranged. Such circularly permuted Cas9 proteins (“CP-Cas9”), or variants thereof, retain the ability to bind DNA when complexed with a guide RNA (gRNA). See, Oakes et al., “Protein Engineering of Cas9 for enhanced function,” Methods Enzymol, 2014, 546: 491-511; Oakes et al., “CRISPR-Cas9 Circular Permutants as Programmable Scaffolds for Genome Modification,” Cell, Jan. 10, 2019, 176: 254-267; and International Publication No. WO 2020/041751, published Feb. 27, 2020, each of are incorporated herein by reference. The present disclosure contemplates any previously known CP-Cas9 or use a new CP-Cas9 so long as the resulting circularly permuted protein retains the ability to bind DNA when complexed with a gRNA.

[0071] “CRISPR” is a family of DNA sequences (i.e., CRISPR clusters) in bacteria and archaea that represent snippets of prior infections by a virus that have invaded the prokaryote. The snippets of DNA are used by the prokaryotic cell to detect and destroy DNA from subsequent attacks by similar viruses and effectively constitute, along with an array of CRISPR-associated proteins (including Cas9 and homologs thereof) and CRISPR-associated RNA, a prokaryotic immune defense system. In nature, CRISPR clusters are transcribed and processed into CRISPR RNA (crRNA). In certain types of CRISPR systems (e.g., type II CRISPR systems), correct processing of pre-crRNA requires a trans-encoded small RNA (tracrRNA), endogenous ribonuclease 3 (mc), and a Cas9 protein. The tracrRNA serves as a guide for ribonuclease 3-aided processing of pre-crRNA. Subsequently, Cas9/crRNA/tracrRNA endonucleolytically cleaves linear or circular nucleic acid target complementary to the RNA. Specifically, the target strand not complementary to crRNA is first cut endonucleolytically, then trimmed 3′-5′ exonucleolytically. In nature, DNA-binding and cleavage typically requires protein and both RNAs. However, single guide RNAs (“sgRNA”, or simply “gRNA”) can be engineered so as to incorporate embodiments of both the crRNA and tracrRNA into a single RNA species—the guide RNA. See, e.g., Jinek M., et al., Science 337:816-821 (2012), the entire contents of which is incorporated herein by reference. Cas9 recognizes a short motif in the CRISPR repeat sequences (the PAM or protospacer adjacent motif) to help distinguish self versus non-self. CRISPR biology, as well as Cas9 nuclease sequences and structures are well known to those of skill in the art (see, e.g., “Complete genome sequence of an M1 strain of Streptococcus pyogenes.” Ferretti J. J., et al., Proc. Natl. Acad. Sci. U.S.A. 98:4658-4663(2001); “CRISPR RNA maturation by trans-encoded small RNA and host factor RNase III.” Deltcheva E., et al., Nature 471:602-607 (2011); and “A programmable dual-RNA-guided DNA endonuclease in adaptive bacterial immunity.” Jinek M., et al., Science 337:816-821(2012), the entire contents of each of which are incorporated herein by reference). Cas9 orthologs have been described in various species, including, but not limited to, S. pyogenes, S. thermophiles, C. ulcerans, S. diphtheria, S. syrphidicola, P intermedia, S. taiwanense, S. iniae, B. baltica, P torquis, S. thermophilus, L. innocua, C. jejuni, G. thermodenitrificans and N. meningitidis. Additional suitable Cas9 nucleases and sequences will be apparent to those of skill in the art based on this disclosure, and such Cas9 nucleases and sequences include Cas9 sequences from the organisms and loci disclosed in Chylinski, Rhun, and Charpentier, “The tracrRNA and Cas9 families of type II CRISPR-Cas immunity systems” (2013) RNA Biology 10:5, 726-737; the entire contents of which are incorporated herein by reference.

[0072] In general, a “CRISPR system” refers collectively to transcripts and other elements involved in the expression of or directing the activity of CRISPR-associated (“Cas”) genes, including sequences encoding a Cas gene, a tracr (trans-activating CRISPR) sequence (e.g. tracrRNA or an active partial tracrRNA), a tracr mate sequence (encompassing a “direct repeat” and a tracrRNA-processed partial direct repeat in the context of an endogenous CRISPR system), a guide sequence (also referred to as a “spacer” in the context of an endogenous CRISPR system), or other sequences and transcripts from a CRISPR locus. The tracrRNA of the system is complementary (fully or partially) to the tracr mate sequence present on the guide RNA.

[0073] The term “effective amount,” as used herein, refers to an amount of a biologically active agent that is sufficient to elicit a desired biological response. For example, in some embodiments, an effective amount of a base editor may refer to the amount of the base editor that is sufficient to edit a target site nucleotide sequence, e.g., a genome. In some embodiments, an effective amount of a base editor provided herein, e.g., of a base editor comprising a Cas9 nickase domain and a nucleobase modification domain (e.g., a deaminase domain) may refer to the amount of the base editor that is sufficient to induce editing of a target site specifically bound and edited by the base editor. In some embodiments, an effective amount of a base editor provided herein may refer to the amount of the base editor sufficient to induce editing having the following characteristics: >50% product purity, <5% indels over regions immediately surrounding the target sequence, and/or an editing window of 2-8 nucleotides. In other embodiments, an effective amount of a base editor may refer to the amount of the base editor sufficient to induce editing of >45% product purity, <10% indels, a ratio of intended point mutations to indels that is at least 5:1, and/or an editing window of 2-10 nucleotides. As will be appreciated by the skilled artisan, the effective amount of an agent, e.g., a base editor, a nuclease, a deaminase, a hybrid protein, a complex of a protein and a polynucleotide, or a polynucleotide (e.g., gRNA), may vary depending on various factors, such as, for example, on the desired biological response, e.g., on the specific allele, genome, or target site to be edited, on the target cell or tissue (i.e., the cell or tissue to be edited), and on the agent being used.

[0074] The term “off-target editing,” as used herein, refers to the introduction of unintended modifications (e.g., deaminations) to nucleotides (e.g. cytosine) in a sequence outside the canonical base editor binding window (i.e., from one protospacer position to another, typically 2 to 8 nucleotides long). Off-target editing can result from weak or non-specific binding of the gRNA sequence to the target sequence. Off-target editing can also result from intrinsic association of the nucleotide modification domain (e.g. deaminase domain) of a base editor to nucleobases in loci unrelated to the target sequence.

[0075] The term “Cas9-dependent off-target editing” refers to the introduction of unintended modifications that result from weak or non-specific binding of a Cas9-gRNA complex (e.g., a complex between a gRNA and the base editor's Cas9 domain) to nucleic acid sites that have fairly high (e.g. more than 60%, or having fewer than 6 mismatches relative to) sequence identity to a target sequence. In contrast, the term “Cas9-independent off-target editing” refers to the introduction of unintended modifications that result from weak associations of a base editor (e.g., the nucleotide modification domain) to nucleic acid sites that do not have high sequence identity (about 60% or less, or having 6-8 or more mismatches relative to) to a target sequence. Because these associations occur independent of any hybridization between the Cas9-gRNA complex and the relevant nucleic acid site, they are referred to as “Cas9-independent.”

[0076] The term “on-target editing,” as used herein, refers to the introduction of intended modifications (e.g., deaminations) to nucleotides (e.g., cytosine) in a target sequence, such as using the base editors described herein.

[0077] The terms “on-target editing frequency” and “on-target editing efficiency”, as used herein, refers to the number or proportion of intended base pairs that are edited. For example, if a base editor edits 10% of the base pairs that it is intended to target (e.g., within a cell or within a population of cells), then the base editor can be described as being 10% efficient. Some aspects of editing efficiency embrace the modification (e.g., deamination) of a specific nucleotide within DNA, without generating a large number or percentage of insertions or deletions (i.e., indels). It is generally accepted that editing while generating less than 5% indels over regions immediately surrounding the target sequence (as measured over total target nucleotide substrates) constitutes high editing efficiency. The generation of more than 20% indels is generally accepted as poor or low editing efficiency.

[0078] The term “off-target editing frequency,” as used herein, refers to the number or proportion of unintended base pairs that are edited. On-target and off-target editing frequencies may be measured by the methods and assays described herein, further in view of techniques known in the art, including high-throughput sequencing reads. As used herein, high-throughput sequencing involves the hybridization of nucleic acid primers (e.g., DNA primers) with complementarity to nucleic acid (e.g., DNA) regions just upstream or downstream of the target sequence or off-target sequence of interest. Because the DNA target sequence and the Cas9-independent off-target sequences are known a priori in the methods disclosed herein, nucleic acid primers with sufficient complementarity to regions upstream or downstream of the target sequence and Cas9-independent off-target sequences of interest may be designed using techniques known in the art, such as the PhusionU PCR kit (Life Technologies), Phusion HS II kit (Life Technologies), and Illumina MiSeq kit. Since many of the Cas9-dependent off-target sites have high sequence identity to the target site of interest, nucleic acid primers with sufficient complementarity to regions upstream or downstream of the Cas9-dependent off-target site may likewise be designed using techniques and kits known in the art. These kits make use of polymerase chain reaction (PCR) amplification, which produces amplicons as intermediate products. The target and off-target sequences may comprise genomic loci that further comprise protospacers and PAMs. Accordingly, the term “amplicons,” as used herein, may refer to nucleic acid molecules that constitute the aggregates of genomic loci, protospacers and PAMs. High-throughput sequencing techniques used herein may further include Sanger sequencing and/or whole genome sequencing (WGS).

[0079] The term “linker,” as used herein, refers to a chemical group or a molecule linking two molecules or domains, e.g., a Cas9 domain and a deaminase domain. In some embodiments, a linker joins a Cas9 nickase domain and cytidine deaminase domain of the disclosed base editors. In some embodiments, a linker joins a cytidine deaminase domain and a UGI domain, and/or joins each of one or more UGI domains, within the disclosed base editors. Typically, the linker is positioned between, or flanked by, two groups, molecules, or other domains and connected to each one via a covalent bond, thus connecting the two. In some embodiments, the linker is an amino acid or a plurality of amino acids (e.g., a peptide or protein). In some embodiments, the linker is an organic molecule, group, polymer (e.g., polyethylene and polyethylene glycol), or chemical domain. Chemical domains include, but are not limited to, amide, urea, carbamate, carbonate, ester, ketone, acetal, ketal, phosphoramidite, hydrazone, imine, oxime, disulfide, silyl, hydrazine, hydrazone, thiol, imidazole, ether, thioether, carbon-carbon bond, carbon-heteroatom bond, and azo domains. The linker may comprise a moiety derived from a click chemistry reaction (e.g., triazole, diazole, diazine, sulfide bond, maleimide ring, succinimide ring, ester, amide).

[0080] In some embodiments, the linker is 3-200 amino acids in length, for example, 3, 4, 5, 6, 7, 8, 9, 10, 11, 12, 13, 14, 15, 16, 17, 18, 19, 20, 21, 22, 23, 24, 25, 26, 27, 28, 29, 30, 30-35, 35-40, 40-45, 45-50, 50-60, 60-70, 70-80, 80-90, 90-100, 100-150, or 150-200 amino acids in length. Longer or shorter linkers are also contemplated. In certain embodiments, the linker is 9 amino acids in length. In certain embodiments, the linker is 32 amino acids in length.

[0081] The term “mutation,” as used herein, refers to a substitution of a residue within a sequence, e.g., a nucleic acid or amino acid sequence, with another residue; a deletion or insertion of one or more residues within a sequence; or a substitution of a residue within a sequence of a genome in a subject to be corrected. Mutations are typically described herein by identifying the original residue followed by the position of the residue within the sequence and by the identity of the newly substituted residue. Various methods for making the amino acid substitutions (mutations) provided herein are well known in the art, and are provided by, for example, Green and Sambrook, Molecular Cloning: A Laboratory Manual (4^{th} ed., Cold Spring Harbor Laboratory Press, Cold Spring Harbor, N.Y. (2012)). Mutations can include a variety of categories, such as single base polymorphisms, microduplication regions, indel, and inversions, and is not meant to be limiting in any way. Mutations can include “loss-of-function” mutations which is the normal result of a mutation that reduces or abolishes a protein activity. Most loss-of-function mutations are recessive, because in a heterozygote the second chromosome copy carries an unmutated version of the gene coding for a fully functional protein whose presence compensates for the effect of the mutation. There are some exceptions where a loss-of-function mutation is dominant, one example being haploinsufficiency, where the organism is unable to tolerate the approximately 50% reduction in protein activity suffered by the heterozygote. This is the explanation for a few genetic diseases in humans, including Marfan syndrome which results from a mutation in the gene for the connective tissue protein fibrillin. Mutations also embrace “gain-of-function” mutations, which is one which confers an abnormal activity on a protein or cell that is otherwise not present in a normal condition. Many gain-of-function mutations are in regulatory sequences rather than in coding regions, and can therefore have a number of consequences. For example, a mutation might lead to one or more genes being expressed in the wrong tissues, these tissues gaining functions that they normally lack. Alternatively the mutation could lead to overexpression of one or more genes involved in control of the cell cycle, thus leading to uncontrolled cell division and hence to cancer. Because of their nature, gain-of-function mutations are usually dominant.

[0082] The terms “non-naturally occurring” or “engineered” are used interchangeably and indicate the involvement of the hand of man. The terms, when referring to nucleic acid molecules or polypeptides (e.g., Cas9 or deaminases) mean that the nucleic acid molecule or the polypeptide is at least substantially free from at least one other component with which they are naturally associated in nature and/or as found in nature (e.g., an amino acid sequence not found in nature).

[0083] The term “nucleic acid,” as used herein, refers to RNA as well as single- and/or double-stranded DNA. Nucleic acids may be naturally occurring, for example, in the context of a genome, a transcript, an mRNA, tRNA, rRNA, siRNA, snRNA, plasmid, cosmid, chromosome, chromatid, or other naturally occurring nucleic acid molecule. On the other hand, a nucleic acid molecule may be a non-naturally occurring molecule, e.g., a recombinant DNA or RNA, an artificial chromosome, an engineered genome, or fragment thereof, or a synthetic DNA, RNA, DNA/RNA hybrid, or including non-naturally occurring nucleotides or nucleosides. Furthermore, the terms “nucleic acid,” “DNA,” “RNA,” and/or similar terms include nucleic acid analogs, e.g., analogs having other than a phosphodiester backbone. Nucleic acids can be purified from natural sources, produced using recombinant expression systems and optionally purified, chemically synthesized, etc. Where appropriate, e.g., in the case of chemically synthesized molecules, nucleic acids can comprise nucleoside analogs such as analogs having chemically modified bases or sugars, and backbone modifications. A nucleic acid sequence is presented in the 5′ to 3′ direction unless otherwise indicated. In some embodiments, a nucleic acid is or comprises natural nucleosides (e.g., adenosine, thymidine, guanosine, cytidine, uridine, deoxyadenosine, deoxythymidine, deoxyguanosine, and deoxycytidine); nucleoside analogs (e.g., 2-aminoadenosine, 2-thiothymidine, inosine, pyrrolo-pyrimidine, 3-methyl adenosine, 5-methylcytidine, 2-aminoadenosine, C5-bromouridine, C5-fluorouridine, C5-iodouridine, C5-propynyl-uridine, C5-propynyl-cytidine, C5-methylcytidine, 2-aminoadenosine, 7-deazaadenosine, 7-deazaguanosine, 8-oxoadenine, 8-oxoguanosine, O(6)-methylguanine, and 2-thiocytidine); chemically modified bases; biologically modified bases (e.g., methylated bases); intercalated bases; modified sugars (e.g., 2′-fluororibose, ribose, 2′-deoxyribose, arabinose, and hexose); and/or modified phosphate groups (e.g., phosphorothioates and 5′-N-phosphoramidite linkages).

[0084] As used herein to modify guide RNA molecules, the term “backbone” refers to the component of the guide RNA that comprises the core region, also known as the crRNA/tracrRNA. The backbone is separate from the guide sequence, or spacer, region of the guide RNA, which has complementarity to a protospacer of a nucleic acid molecule.

[0085] The term “nucleic acid programmable D/RNA binding protein (napR/DNAbp)” refers to any protein that may associate (e.g., form a complex) with one or more nucleic acid molecules (i.e., which may broadly be referred to as a “napR/DNAbp-programming nucleic acid molecule” and includes, for example, guide RNA in the case of Cas systems) which direct or otherwise program the protein to localize to a specific target nucleotide sequence (e.g., a gene locus of a genome) that is complementary to the one or more nucleic acid molecules (or a portion or region thereof) associated with the protein, thereby causing the protein to bind to the nucleotide sequence at the specific target site. This term “napR/DNAbp” embraces napDNAbps, such as CRISPR Cas9 proteins, as well as Cas9 equivalents, homologs, orthologs, or paralogs, whether naturally occurring or non-naturally occurring (e.g., engineered or modified), and may include a Cas9 equivalent from any type of CRISPR system (e.g., type II, V, VI), including Cpf1 (a type-V CRISPR-Cas systems), C2c1 (a type V CRISPR-Cas system), C2c2 (a type VI CRISPR-Cas system, also known as Cas13a), C2c3 (a type V CRISPR-Cas system, also known as Cas12c), dCas9, GeoCas9, CjCas9, Cas12a (e.g., LbCas12a, AsCas12a, CeCas12a and MbCas12a), Cas12b, Cas12g, Cas12h, Cas12i, Cas13b, Cas13c, Cas13d, Cas14, Csn2, Argonaute (Ago), nCas9, xCas9, SpCas9-NG, Cas9-KKH, SmacCas9, Spy-macCas9, an SpCas9-NRRH, an SpCas9-NRCH, and an SpCas9-NRTH, and circularly permuted Cas9 domains, such as CP1012, CP1028, CP1041, CP1249, and CP1300. Additional napDNAbp Cas equivalents include Cas3 and CasΦ. Additional Cas-equivalents are described in Makarova et al., “C2c2 is a single-component programmable RNA-guided RNA-targeting CRISPR effector,” Science 2016; 353 (6299), the contents of which are incorporated herein by reference. However, the nucleic acid programmable DNA binding protein (napDNAbp) that may be used in connection with this invention are not limited to CRISPR-Cas systems. The invention embraces any such programmable protein, such as the Argonaute protein from Natronobacterium gregoryi (NgAgo), which may also be used for DNA-guided genome editing. NgAgo-guide DNA system does not require a PAM sequence or guide RNA molecules, which means genome editing can be performed simply by the expression of generic NgAgo protein and introduction of synthetic oligonucleotides on any genomic sequence. See Gao et al., DNA-guided genome editing using the Natronobacterium gregoryi Argonaute. Nature Biotechnology 2016; 34(7):768-73, which is incorporated herein by reference.

[0086] In some embodiments, the napR/DNAbp is a RNA-programmable nuclease, when in a complex with an RNA, may be referred to as a nuclease:RNA complex. Typically, the bound RNA(s) is referred to as a guide RNA (gRNA). gRNAs can exist as a complex of two or more RNAs, or as a single RNA molecule. gRNAs that exist as a single RNA molecule may be referred to as single-guide RNAs (sgRNAs), though “gRNA” is used interchangeably to refer to guide RNAs that exist as either single molecules or as a complex of two or more molecules. Typically, gRNAs that exist as single RNA species comprise two domains: (1) a domain that shares homology to a target nucleic acid (e.g., and directs binding of a Cas9 (or equivalent) complex to the target); and (2) a domain that binds a Cas9 protein. In some embodiments, domain (2) corresponds to a sequence known as a tracrRNA, and comprises a stem-loop structure. For example, in some embodiments, domain (2) is homologous to a tracrRNA as depicted in FIG. 1E of Jinek et al., Science 337:816-821(2012), the entire contents of which is incorporated herein by reference. Other examples of gRNAs (e.g., those including domain 2) can be found in U.S. Pat. No. 9,340,799, entitled “mRNA-Sensing Switchable gRNAs,” and International Patent Application No. PCT/US2014/054247, filed Sep. 6, 2013, published as WO 2015/035136 on Mar. 12, 2015, and entitled “Delivery System For Functional Nucleases,” the entire contents of each are incorporated herein by reference. In some embodiments, a gRNA comprises two or more of domains (1) and (2), and may be referred to as an “extended gRNA.” For example, an extended gRNA will, e.g., bind two or more Cas9 proteins and bind a target nucleic acid at two or more distinct regions, as described herein. The gRNA comprises a nucleotide sequence that complements a target site, which mediates binding of the nuclease/RNA complex to said target site, providing the sequence specificity of the nuclease:RNA complex. In some embodiments, the RNA-programmable nuclease is the (CRISPR-associated system) Cas9 endonuclease, for example Cas9 (Csn1) from Streptococcus pyogenes (see, e.g., “Complete genome sequence of an M1 strain of Streptococcus pyogenes.” Ferretti J. J. et al., Proc. Natl. Acad. Sci. U.S.A. 98:4658-4663(2001); “CRISPR RNA maturation by trans-encoded small RNA and host factor RNase III.” Deltcheva E. et al., Nature 471:602-607 (2011); and Jinek M. et al., “A programmable dual-RNA-guided DNA endonuclease in adaptive bacterial immunity.” Science 337:816-821 (2012), each of which is incorporated herein by reference.

[0087] The napR/DNAbp nucleases (e.g., Cas9) use RNA:DNA hybridization to target DNA cleavage sites, these proteins are able to be targeted, in principle, to any sequence specified by the guide RNA. Methods of using napR/DNAbp nucleases, such as Cas9, for site-specific cleavage (e.g., to modify a genome) are known in the art (see e.g., Cong, L. et al. Multiplex genome engineering using CRISPR/Cas systems. Science 339, 819-823 (2013); Mali, P. et al. RNA-guided human genome engineering via Cas9. Science 339, 823-826 (2013); Hwang, W. Y et al. Efficient genome editing in zebrafish using a CRISPR-Cas system. Nature Biotechnology 31, 227-229 (2013); Jinek, M. et al. RNA-programmed genome editing in human cells. eLife 2, e00471 (2013); Dicarlo, J. E. et al., Genome engineering in Saccharomyces cerevisiae using CRISPR-Cas systems. Nucleic Acid Res. (2013); Jiang, W. et al. RNA-guided editing of bacterial genomes using CRISPR-Cas systems. Nature Biotechnology 31, 233-239 (2013); the entire contents of each of which are incorporated herein by reference).

[0088] The term “napR/DNAbp-programming nucleic acid molecule” or equivalently “guide sequence” refers the one or more nucleic acid molecules which associate with and direct or otherwise program a napR/DNAbp protein to localize to a specific target nucleotide sequence (e.g., a gene locus of a genome) that is complementary to the one or more nucleic acid molecules (or a portion or region thereof) associated with the protein, thereby causing the napR/DNAbp protein to bind to the nucleotide sequence at the specific target site. A non-limiting example is a guide RNA of a Cas protein of a CRISPR-Cas genome editing system.

[0089] A nuclear localization signal or sequence (NLS) is an amino acid sequence that tags, designates, or otherwise marks a protein for import into the cell nucleus by nuclear transport. Typically, this signal consists of one or more short sequences of positively charged lysines or arginines exposed on the protein surface. Different nuclear localized proteins may share the same NLS. An NLS has the opposite function of a nuclear export signal (NES), which targets proteins out of the nucleus. Thus, a single nuclear localization signal can direct the entity with which it is associated to the nucleus of a cell. Such sequences can be of any size and composition, for example, more than 25, 25, 15, 12, 10, 8, 7, 6, 5, or 4 amino acids, but will preferably comprise at least a four to eight amino acid sequence known to function as a nuclear localization signal (NLS). NLS sequences are described in Plank et al., International PCT Application PCT/EP2000/011690, filed Nov. 23, 2000, published as WO/2001/038547 on May 31, 2001, the contents of which are incorporated herein by reference

[0090] The term, as used herein, “nucleotide modification domain” embraces any protein, enzyme, or polypeptide (or variant thereof) which is capable of modifying, substituting, replacing, or exchanging a DNA or RNA molecule (e.g. a DNA or RNA nucleobase). Nucleotide modification domains may be naturally occurring, or may be engineered. For example, a nucleotide modification domain can include one or more DNA repair enzymes, for example, and an enzyme or protein involved in base excision repair (BER), nucleotide excision repair (NER), homology-dependnent recombinational repair (HR), non-homologous end-joining repair (NHEJ), microhomology end-joining repair (MMEJ), mismatch repair (MMR), direct reversal repair, or other known DNA repair pathway. A nucleotide modification domain can have one or more types of enzymatic activities, including, but not limited to, endonuclease activity, polymerase activity, ligase activity, replication activity, and proofreading activity. Nucleotide modification domains include DNA or RNA-modifying enzymes and/or DNA or RNA-displacing enzymes, such as base exchange enzymes, deaminases, which covalently modify nucleobases leading in some cases to mutagenic corrections by way of normal cellular DNA repair and replication processes. Exemplary nucleotide modification domains include, but are not limited to, a deaminase, a nuclease, a nickase, a recombinase, a methyltransferase, a methylase, an acetylase, an acetyltransferase, a transcriptional activator, or a transcriptional repressor domain. In some embodiments the nucleotide modification domain is a deaminase domain (e.g., APOBEC1, AID or CDA).

[0091] As used herein, the terms “oligonucleotide” and “polynucleotide” can be used interchangeably to refer to a polymer of nucleotides (e.g., a string of at least three nucleotides).

[0092] The term “promoter” is art-recognized and refers to a nucleic acid molecule with a sequence recognized by the cellular transcription machinery and able to initiate transcription of a downstream gene. A promoter can be constitutively active, meaning that the promoter is always active in a given cellular context, or conditionally active, meaning that the promoter is only active in the presence of a specific condition. For example, a conditional promoter may only be active in the presence of a specific protein that connects a protein associated with a regulatory element in the promoter to the basic transcriptional machinery, or only in the absence of an inhibitory molecule. A subclass of conditionally active promoters are inducible promoters that require the presence of a small molecule “inducer” for activity. Examples of inducible promoters include, but are not limited to, arabinose-inducible promoters, Tet-on promoters, and tamoxifen-inducible promoters. A variety of constitutive, conditional, and inducible promoters are well known to the skilled artisan, and the skilled artisan will be able to ascertain a variety of such promoters useful in carrying out the instant invention, which is not limited in this respect. In various embodiments, the specification provides vectors with appropriate promoters for driving expression of the nucleic acid sequences encoding the base editor base editors (or one or more individual components thereof).

[0093] As used herein, the term “protospacer” refers to the sequence (˜20 bp) in DNA adjacent to the PAM (protospacer adjacent motif) sequence which is complementary to the guide, or “spacer,” sequence of the guide RNA. The guide RNA anneals to the protospacer sequence on the target DNA (specifically, one strand thereof, i.e, the “target strand” versus the “non-target strand” of the target sequence). In order for Cas9 to function it also requires a specific protospacer adjacent motif (PAM) that varies depending on the bacterial species of the Cas9 gene. The most commonly used Cas9 nuclease, derived from S. pyogenes, recognizes a PAM sequence of NGG that is found directly downstream of the target sequence in the genomic DNA, on the non-target strand. The skilled person will appreciate that the literature in the state of the art sometimes refers to the “protospacer” as the ˜20-nt target-specific guide sequence on the guide RNA itself, rather than referring to it as a “spacer.” The context of the description surrounding the appearance of either “protospacer” or “spacer” will help inform the reader as to whether the term is reference to the gRNA or the DNA target. Both usages of these terms are acceptable as the state of the art uses both terms in each of these ways.

[0094] The terms “protein,” “peptide,” and “polypeptide” are used interchangeably herein, and refer to a polymer of amino acid residues linked together by peptide (amide) bonds. The terms refer to a protein, peptide, or polypeptide of any size, structure, or function. Typically, a protein, peptide, or polypeptide will be at least three amino acids long. A protein, peptide, or polypeptide may refer to an individual protein or a collection of proteins. One or more of the amino acids in a protein, peptide, or polypeptide may be modified, for example, by the addition of a chemical entity such as a carbohydrate group, a hydroxyl group, a phosphate group, a farnesyl group, an isofarnesyl group, a fatty acid group, a linker for conjugation, functionalization, or other modification, etc. A protein, peptide, or polypeptide may also be a single molecule or may be a multi-molecular complex. A protein, peptide, or polypeptide may be just a fragment of a naturally occurring protein or peptide. A protein, peptide, or polypeptide may be naturally occurring, engineered, or synthetic, or any combination thereof. In some embodiments, the protein or polypeptide is a fusion protein.

[0095] The term “fusion protein” as used herein refers to a hybrid polypeptide which comprises protein domains from at least two different proteins. One protein may be located at the amino-terminal (N-terminal) portion of the fusion protein or at the carboxy-terminal (C-terminal) protein thus forming an “amino-terminal fusion protein” or a “carboxy-terminal fusion protein,” respectively. A protein may comprise different domains, for example, a nucleic acid binding domain (e.g., the gRNA binding domain of Cas9 that directs the binding of the protein to a target site) and a nucleic acid cleavage domain. In some embodiments, a protein is in a complex with, or is in association with, a nucleic acid, e.g., RNA. Any of the proteins provided herein may be produced by any method known in the art. For example, the proteins provided herein may be produced via recombinant protein expression and purification, which is especially suited for fusion proteins comprising a peptide linker. Methods for recombinant protein expression and purification are well known, and include those described by Green and Sambrook, Molecular Cloning: A Laboratory Manual (4th ed., Cold Spring Harbor Laboratory Press, Cold Spring Harbor, N.Y. (2012)), the entire contents of which are incorporated herein by reference.

[0096] The term “product purity,” as used herein, refers to the percentage of desired products over total products of a base editing reaction. For instance, product purity of a CBE may be measured as the percentage of total edited sequencing reads (reads in which a target C has been converted to a different base) in which the target C is edited to a T, over a portion of interest of the nucleic acid. Product purity embraces the absence of indels, as well as the desired product of a base conversion.

[0097] The term “R-loop” refers to a triplex structure wherein the two strands of a double-stranded DNA are separated for a stretch of nucleotides and held apart by a single-stranded RNA molecule (e.g., gRNA). R-loop formation may be induced by the hybridization of a gRNA having complementarity to the DNA, in association with a napDNAbp protein or domain (e.g., Cas9). Two R-loops are referred to as “orthogonal” when the mechanisms (e.g., napDNAbp-gRNA complexes) that generate their formation function independently of one another.

[0098] The term “recombinant” as used herein in the context of proteins or nucleic acids refers to proteins or nucleic acids that do not occur in nature but are the product of human engineering. For example, in some embodiments, a recombinant protein or nucleic acid molecule comprises an amino acid or nucleotide sequence that comprises at least one, at least two, at least three, at least four, at least five, at least six, or at least seven mutations as compared to a naturally occurring sequence.

[0099] The term “subject,” as used herein, refers to an individual organism, for example, an individual mammal. In some embodiments, the subject is a human. In some embodiments, the subject is a non-human mammal. In some embodiments, the subject is a non-human primate. In some embodiments, the subject is a rodent (e.g., mouse, rat). In some embodiments, the subject is a sheep, a goat, a cattle, a cat, or a dog. In some embodiments, the subject is a vertebrate. In some embodiments, the subject is an amphibian, a reptile, a fish, an insect (e.g., fly), or a nematode. In some embodiments, the subject is a research animal. In some embodiments, the subject is an experimental organism. In some embodiments, the subject is a plant. In some embodiments, the subject is genetically engineered, e.g., a genetically engineered non-human subject. The subject may be of either sex and at any stage of development. In some embodiments, the subject is a microorganism, such as a bacteria.

[0100] The terms “target sequence” and “target site” refer to a sequence within a nucleic acid molecule that is edited by a base editor (e.g., a base editor as provided herein). The target site contains a protospacer sequence within a nucleic acid molecule to which a complex of the base editor and the guide RNA binds. The protospacer sequence must be complementary to the gRNA. The target sequence must also contain a “protospacer-adjacent motif” (PAM) at the 3′-end of the protospacer. Base editing typically requires a PAM to be positioned approximately 13-17 nucleotides from a target base pair and some forms of homology-directed repair, which are most efficient when DNA cleavage occurs ˜ 10-20 base pairs away from a desired alteration. To address this limitation, researchers have harnessed natural CRISPR nucleases with different PAM requirements and engineered existing systems to accept variants of naturally recognized PAMs. Other natural CRISPR nucleases shown to function efficiently in mammalian cells include Staphylococcus aureus Cas9 (SaCas9), Acidaminococcus sp. Cpf1 (AsCpf1), Lachnospiraceae bacterium Cpf1, Campylobacter jejuni Cas9, Streptococcus thermophilus Cas9, and Neisseria meningitides Cas9.

[0101] The term “vector,” as used herein, may refer to a nucleic acid that has been modified to encode a base editor and/or one or more gRNAs. Exemplary vectors may also encode one or more isolated napDNAbps, such as isolated Cas9 proteins (e.g., nuclease inactive Cas9 proteins). Exemplary suitable vectors include viral vectors, such as retroviral vectors and AAV vectors, and plasmids.

[0102] The term “viral vector,” as used herein, refers to a nucleic acid comprising a viral genome that, when introduced into a suitable host cell, can be replicated and packaged into viral particles able to transfer the viral genome into a host cell, e.g. by integration of the viral genome into the host cell genome. In some embodiments, the viral vector is an adeno-associated virus (AAV) vector.

[0103] The term “viral particle,” as used herein, refers to a viral genome, for example, a DNA or RNA genome, that is associated with a coat of a viral protein or proteins, and, in some cases, with an envelope of lipids. For example, a phage particle comprises a phage genome packaged into a protein encoded by the wild type phage genome.

[0104] The terms “treatment,” “treat,” and “treating,” refer to a clinical intervention aimed to reverse, alleviate, delay the onset of, or inhibit the progress of a disease, disorder, or condition, or one or more symptoms thereof, as described herein. As used herein, the terms “treatment,” “treat,” and “treating” refer to a clinical intervention aimed to reverse, alleviate, delay the onset of, or inhibit the progress of a disease, disorder, or condition, or one or more symptoms thereof, as described herein. In some embodiments, treatment may be administered after one or more symptoms have developed and/or after a disease has been diagnosed. In other embodiments, treatment may be administered in the absence of symptoms, e.g., to prevent or delay onset of a symptom or inhibit onset or progression of a disease. For example, treatment may be administered to a susceptible individual prior to the onset of symptoms (e.g., in light of a history of symptoms and/or in light of genetic or other susceptibility factors). Treatment may also be continued after symptoms have resolved, for example, to prevent or delay their prevention or recurrence.

[0105] As used herein, the term “variant” refers to a protein having characteristics that deviate from what occurs in nature, e.g., a “variant” is at least about 70% identical, at least about 80% identical, at least about 90% identical, at least about 95% identical, at least about 96% identical, at least about 97% identical, at least about 98% identical, at least about 99% identical, at least about 99.5% identical, or at least about 99.9% identical to the wild type protein. For instance, a variant nucleotide modification domain is a nucleotide modification domain comprising one or more changes in amino acid residues of a deaminase, as compared to the wild type amino acid sequences thereof. These changes include chemical modifications, including substitutions of different amino acid residues, as well as truncations. This term embraces functional fragments of the wild type amino acid sequence.

[0106] The level or degree of which the property is retained may be reduced relative to the wild type protein but is typically the same or similar in kind. Generally, variants are overall very similar, and in many regions, identical to the amino acid sequence of the protein described herein. A skilled artisan will appreciate how to make and use variants that maintain all, or at least some, of a functional ability or property.

[0107] The variant proteins may comprise, or alternatively consist of, an amino acid sequence which is at least 80%, 85%, 90%, 95%, 96%, 97%, 98%, 99%, or 100%, identical to, for example, the amino acid sequence of a wild-type protein, or any protein provided herein (e.g., Cas9 protein, base editor, and base editor protein). Further polypeptides encompassed by the invention are polypeptides encoded by polynucleotides which hybridize to the complement of a nucleic acid molecule encoding a protein such as a Cas9 protein under stringent hybridization conditions (e.g., hybridization to filter bound DNA in 6× sodium chloride/sodium citrate (SSC) at about 45 degrees Celsius, followed by one or more washes in 0.2.times.SSC, 0.1% SDS at about 50-65 degrees Celsius), under highly stringent conditions (e.g., hybridization to filter bound DNA in 6× sodium chloride/Sodium citrate (SSC) at about 45 degrees Celsius, followed by one or more washes in 0.1×SSC, 0.2% SDS at about 68 degrees Celsius), or under other stringent hybridization conditions which are known to those of skill in the art (see, for example, Ausubel, F. M. et al., eds., 1989 Current Protocol in Molecular Biology, Green publishing associates, Inc., and John Wiley & Sons Inc., New York, at pp. 6.3.1-6.3.6 and 2.10.3).

[0108] By a polypeptide having an amino acid sequence at least, for example, 95% “identical” to a query amino acid sequence, it is intended that the amino acid sequence of the subject polypeptide is identical to the query sequence except that the subject polypeptide sequence may include up to five amino acid alterations per each 100 amino acids of the query amino acid sequence. In other words, to obtain a polypeptide having an amino acid sequence at least 95% identical to a query amino acid sequence, up to 5% of the amino acid residues in the subject sequence may be inserted, deleted, or substituted with another amino acid. These alterations of the reference sequence may occur at the amino- or carboxy-terminal positions of the reference amino acid sequence or anywhere between those terminal positions, interspersed either individually among residues in the reference sequence or in one or more contiguous groups within the reference sequence.

[0109] As a practical matter, whether any particular polypeptide is at least 80%, 85%, 90%, 95%, 96%, 97%, 98%, or 99% identical to, for instance, the amino acid sequence of a protein such as a Cas9 protein, can be determined conventionally using known computer programs. A preferred method for determining the best overall match between a query sequence (a sequence of the present invention) and a subject sequence, also referred to as a global sequence alignment, can be determined using the FASTDB computer program based on the algorithm of Brutlag et al. (Comp. App. Biosci. 6:237-245 (1990)). In a sequence alignment the query and subject sequences are either both nucleotide sequences or both amino acid sequences. The result of said global sequence alignment is expressed as percent identity. Preferred parameters used in a FASTDB amino acid alignment are: Matrix=PAM 0, k-tuple=2, Mismatch Penalty=1, Joining Penalty=20, Randomization Group Length=0, Cutoff Score=1, Window Size=sequence length, Gap Penalty=5, Gap Size Penalty=0.05, Window Size=500 or the length of the subject amino acid sequence, whichever is shorter.

[0110] If the subject sequence is shorter than the query sequence due to N- or C-terminal deletions, not because of internal deletions, a manual correction must be made to the results. This is because the FASTDB program does not account for N- and C-terminal truncations of the subject sequence when calculating global percent identity. For subject sequences truncated at the N- and C-termini, relative to the query sequence, the percent identity is corrected by calculating the number of residues of the query sequence that are N- and C-terminal of the subject sequence, which are not matched/aligned with a corresponding subject residue, as a percent of the total bases of the query sequence. Whether a residue is matched/aligned is determined by results of the FASTDB sequence alignment. This percentage is then subtracted from the percent identity, calculated by the above FASTDB program using the specified parameters, to arrive at a final percent identity score. This final percent identity score is what is used for the purposes of the present invention. Only residues to the N- and C-termini of the subject sequence, which are not matched/aligned with the query sequence, are considered for the purposes of manually adjusting the percent identity score. That is, only query residue positions outside the farthest N- and C-terminal residues of the subject sequence

[0111] As used herein the term “wild type” is a term of the art understood by skilled persons and means the typical form of an organism, strain, gene, or characteristic as it occurs in nature as distinguished from mutant, engineered, or variant forms.

### Detailed Description of Certain Embodiments

[0112] Provided herein are novel assays for determining the off-target effects (e.g., off-target editing frequencies and indels) for base editors. Also provided herein are novel base editor proteins and constructs encoding these base editors, wherein the base editors have reduced Cas9-independent off-target editing frequencies while maintaining high on-target editing efficiencies. Further provided are methods of contacting these base editors with a nucleic acid molecule and obtaining low off-target editing frequencies.

[0113] The function and advantage of these and other embodiments of the present disclosure will be more fully understood from the Examples below. The following Examples are intended to illustrate the benefits of the present disclosure and to describe particular embodiments, but are not intended to exemplify the full scope of the disclosure. Accordingly, it will be understood that the Examples are not meant to limit the scope of the disclosure.

### Assays and Systems for Measuring Off-Target Frequencies

[0114] In some aspects, provided herein are methods for evaluating the off-target effects of a base editor. In various embodiments, these methods are designed for determining the off-target editing frequencies of napDNAbp domain-independent (e.g., Cas9-independent) (or gRNA-independent) off-target editing events. Editing events may comprise deamination events of a cytosine (or adenine) base by a CBE (or an adenine base editor, or ABE). Off-target deamination events that are dependent on the napDNAbp-guide RNA complex tend to be in sequences that have high sequence identity (e.g., greater than 60% sequence identity) to the target sequence. These types of events arise because of imperfect hybridization of the napDNAbp-guide RNA complex to sequences that share identity with the target sequence. In contrast, off-target events that occur independently of the napDNAbp-guide RNA complex arise as a result of stochastic binding of the base editor to DNA sequences (often sequences that do not share high sequence identity with the target sequence) due to an intrinsic affinity of the base editor of the nucleobase modification domain (e.g., the deaminase domain) of the base editor with DNA. NapDNAbp-independent (e.g., Cas9-independent) editing events arise in particular when the base editor is overexpressed in the system under evaluation, such as a cell or a subject.

[0115] Accordingly, in some embodiments, the present disclosure provides methods of determining the off-target editing frequency of a base editor comprising: (a) contacting a nucleic acid molecule comprising a target sequence, with a first complex. The first complex comprises (i) a base editor comprising a napDNAbp domain, and (ii) a first guide RNA that is engineered to bind to the napDNAbp domain of the base editor, wherein the first guide RNA comprises a first sequence of at least 10 contiguous nucleotides (i.e., a first guide sequence) that is complementary to the target sequence; (b) contacting the nucleic acid molecule with a second complex, wherein the second complex comprises (iii) a first nuclease inactive napDNAbp (e.g., a dead Cas9 (dCas9)) protein, and (iv) a second guide RNA that is engineered to bind to the first nuclease inactive napDNAbp protein, wherein the second guide RNA comprises a second sequence of at least 10 contiguous nucleotides (i.e., a second guide sequence) that is complementary to a third sequence (i.e., a known off-target sequence), whereby the first complex and second complex generate two or more R-loops in the nucleic acid molecule; and (c) sequencing at least a portion of the target sequence and/or at least a portion of the nucleic acid molecule comprising the third sequence. This sequencing step is performed to quantify the number of modified (i.e. non-wild-type) sequencing reads at both the target sequence and the third sequence, which would indicate on-target and off-target editing, respectively. The target sequence and third sequence each contain protospacers of 10-30 nucleotides that are complementary to the guide sequences of the first guide RNA and second guide RNA, respectively. In certain embodiments, these protospacers contain 20 nucleotides.

[0116] In some embodiments, the disclosed methods comprise contacting the nucleic acid molecule with additional complexes of isolated nuclease inactive napDNAbp protein in association with a gRNA. These complexes may be identical or essentially identical to each other, in that they are associated with identical or nearly identical gRNAs that have complementarity to the same off-target sequence. Any one of these complexes may be distinct or essentially identical to the second complex. The second and third guide RNA may share 100% sequence identity in the guide sequence of the guide RNA. The second and third guide RNA may share at least 95%, 98%, 98.5%, or 100% sequence identity in the backbone of the guide RNA sequence. In certain embodiments, the second and third guide RNA share 100% identity, or are the same. Likewise, in certain embodiments, the first nuclease inactive napDNAbp protein and the second nuclease inactive napDNAbp share 100% identity, or are the same.

[0117] The disclosed methods comprise the use of a third, fourth, fifth, sixth, seventh, eighth, ninth, and/or tenth complex. Accordingly, the methods may further comprise a step of contacting the nucleic acid molecule with a third, fourth, fifth, and/or sixth complex, wherein each of the third, fourth, fifth, and/or sixth complexes comprises (v) a second (isolated) nuclease inactive napDNAbp protein, and (vi) a third guide RNA that is engineered to bind to the second nuclease inactive napDNAbp protein, wherein the third guide RNA comprises a fourth sequence of at least 10 contiguous nucleotides (i.e., a guide sequence) that is complementary to the third sequence (off-target sequence). In particular embodiments, six total complexes of napDNAbp protein-gRNA are used. R-loops are generated by a nuclease inactive napDNAbp protein (e.g., a dead Cas9) and one or more guide RNAs (e.g., sgRNAs) that is engineered to bind the napDNAbp protein (e.g., a Cas9 derived from S. aureus). Guide RNAs are engineered to bind particular napDNAbp's (e.g., Cas9 proteins from different species) by modifying the backbone of the RNA to be specific for the binding pockets of the particular napDNAbp.

[0118] In some embodiments, the nucleic acid molecule is subsequently sequenced (e.g., through high-throughput sequencing) at loci comprising the third sequence to quantify the number of modified sequencing reads at this sequence.

[0119] The nuclease inactive napDNAbp protein of the described complexes is an isolated protein, i.e., it does not exist as a domain of a base editor or other fusion protein. In some embodiments, the nuclease inactive napDNAbp protein of any of the described complexes is a dead Cas9 (dCas9) protein. Accordingly, in some embodiments, the second complex comprises a first dCas9 protein, and the third and subsequent complexes each comprise a second dCas9 protein. In some embodiments, the nuclease inactive napDNAbp protein of any of the described complexes is a dead Cas9 protein from S. aureus. In some embodiments, the nuclease inactive napDNAbp protein is a dead Cas9 protein from S. pyogenes.

[0120] In some embodiments, the napDNAbp domain of the base editor is a Cas9 domain. The Cas9 domain of the base editor may comprise a wild-type Cas9. In some embodiments, the Cas9 domain of the base editor comprises a Cas9 nickase. In some embodiments, the Cas9 domain of the base editor comprises a dead Cas9. In some embodiments, the Cas9 domain is derived from a first bacterial species. In some embodiments, the first dCas9 protein and the second dCas9 protein are derived from a second bacterial species. In certain embodiments, the first bacterial species is S. pyogenes, and/or the second bacterial species is S. aureus. In other embodiments, the first bacterial species is S. aureus, and/or the second bacterial species is S. pyogenes. By taking advantage of the specificity of the backbones of engineered guide RNAs to particular Cas9 proteins, Cas9 proteins from different species may be used as orthogonal DNA-binding proteins, such that one may precisely direct a Cas9 protein to one of several off-target sites of interest by providing an orthogonal gRNAs that will be recognize only by a Cas9 protein of a single species (see FIG. 2E). For instance, in the disclosed methods, the base editor's Cas9 domain (e.g., Cas9 nickase domain) derived from a first species is directed to the on-target site, while the first dCas9 protein and the second dCas9 protein, which are derived from a second species, are directed to known off-target sites. Each of these isolated dCas9 proteins creates an “orthogonal R-loop” at the off-target sites, which serves as an ideal substrate for the measurement of off-target editing at a particular locus in lieu of measuring off-target editing across the whole genome. See FIG. 2B.

[0121] As described above, “R-loops” refer to triplex structures that arise when a single-stranded gRNA molecule “invades” and pulls apart the strands of a double-stranded DNA molecule and hybridizes (completely or partially) to one of the two strands. The R-loops may be induced by the napDNAbp domain of the base editor, the first and/or second the nuclease inactive napDNAbp protein, or both. In various embodiments, the R-loops are induced by the napDNAbp domain of the base editor, the first nuclease inactive napDNAbp protein and the second the nuclease inactive napDNAbp protein. The R-loop induced by the napDNAbp domain of the base editor may be referred to as an “on-target R-loop,” and the R-loop(s) induced by the nuclease inactive napDNAbp proteins may be referred to as an “off-target R-loops”.

[0122] The base editor used in the disclosed methods may be a cytosine base editor (CBE). CBEs enzymatically deaminate a cytosine nucleobase of a C:G nucleobase pair to a uracil. Accordingly, disclosed are methods designed for determining the off-target deamination frequencies of Cas9-independent (or gRNA-independent) off-target editing events of CBEs.

[0123] In other embodiments, the base editor of the disclosed methods may comprise an adenine base editor (ABE). In other embodiments, the base editor may comprise a transversion base editor, such as a C-to-G base editor (or “CGBE”), a G-to-T base editor (or “GTBE”), an A-to-T base editor (or “ATBE”), or an A-to-C base editor (or “ACBE”).

[0124] In order to evaluate Cas9-independent deamination events, the off-target sequence of the disclosed methods comprises an off-target site that is unrelated to the target site. Accordingly, the third sequence comprises a protospacer sequence that has about 70% or less sequence identity to the target sequence. The third sequence may comprise a protospacer sequence that has about 60% or less sequence identity to the target sequence. In other embodiments, the third sequence may comprise a protospacer sequence that has about 55% or less, 50% or less, 45% or less, 40% or less, 35% or less, or 30% or less sequence identity to the target sequence. The third sequence may comprise a protospacer sequence that differs from the protospacer of the target sequence in 5, 6, 7, 8, 9, 10, 11, 12, 13, 14, 15, or greater than 15 nucleotide positions (or has 5, 6, 7, 8, 9, 10, 11, 12, 13, 14, 15 or greater than 15 “mismatches” relative to the target sequence). In certain embodiments, the protospacer of the third sequence differs from the protospacer of the target sequence in 6 or more, 7 or more, or 8 or more nucleotide positions. Tsai, S. Q. et al. Nat. Biotechnol. 33, 187-197 (2015), and Komor, A. C. et al. Nature 533, 420-424 (2016), each of which is incorporated herein by reference, detected Cas9-dependent off-target DNA cleavage events at sites that shared at least 70% identity to the on-target sequence. In the experiments described in these publications, the number of nucleotide position mismatches between an on-target protospacer and a detected Cas9-dependent off-target protospacer, each having lengths of 20 nucleotides, was six mismatches. The target and off-target sequences of the disclosure may each have a length of 20-25 nucleotides, 25-35 nucleotides, 35-45 nucleotides, or more than 45 nucleotides.

[0125] In some embodiments, the first gRNA may comprise a first sequence of at least 15, at least 20, or more than 20 contiguous nucleotides that is complementary to the target sequence. In some embodiments, the second and/or third gRNAs may comprise a second sequence of at least 15, at least 20, or more than 20 contiguous nucleotides that is complementary to the third sequence.

[0126] In some embodiments, the first gRNA may comprise a plurality of unique gRNAs, wherein each comprises a sequence of at least 10 contiguous nucleotides that is complementary to one or more target sequences in the nucleic acid molecule. In some embodiments, the disclosed methods may detect substantially no difference in the degree of off-target editing when one or more unique on-target gRNAs are utilized because the off-target deamination events are gRNA sequence-independent (see, e.g., FIG. 2C).

[0127] The target sequence and third sequence may be distant from or proximal to one another. In some embodiments, the target sequence and the third sequence are within about 1000 nucleotides, 500 nucleotides, about 400 nucleotides, about 300 nucleotides, about 200 nucleotides, about 150 nucleotides, about 120 nucleotides, about 100 nucleotides, about 90 nucleotides, or about 75 nucleotides of one another. In some embodiments, the target sequence and the third sequence are about 0.01 m, 0.05 m, 0.1 m, 0.25 m, 0.5 m, 0.75 m, 1 m, or more than 1 m apart in three-dimensional space in the nucleus. The target sequence and third sequence may be on separate chromosomes.

[0128] The target sequence and the third sequence may be comprised within the genome of an organism. In some embodiments, the target sequence comprises a C:G nucleobase pair. In other embodiments, the target sequences comprises an A:T nucleobase pair, a T:A nucleobase pair, or a G:C nucleobase pair.

[0129] The step of contacting may further comprise the step of administering to (or transfecting) the cell one or more nucleic acid vectors encoding the base editor, the first gRNA, the first nuclease inactive napDNAbp protein, and the second gRNA. In some embodiments, the base editor and gRNA are administered as a protein:RNA complex, such as a ribonucleoprotein complex. In some embodiments, the step of contacting comprises further transfecting the cell with one or more plasmids encoding the second nuclease inactive napDNAbp protein and the third gRNA. The step of transfecting may be performed using lipofection, nucleofection, or electroporation. The nucleic acid vectors may comprise plasmids.

[0130] In some embodiments, the step of sequencing comprises performing high-throughput sequencing. High-throughput sequencing methods are known in the art.

[0131] In some embodiments, the disclosed methods of off-target effects evaluation yield off-target editing (e.g. off-target deamination) frequencies of less than 1.5% (such as less than 1.25%, less than 1.0%, less than 0.75%, or less than 0.5%) for one or more base editors (e.g., a CBE) under evaluation. The disclosed methods may further yield on-target editing efficiencies of greater than 50% (such as greater than 60%, greater than 70%, or greater than 85%) at the target nucleobase pair for one or more base editors under evaluation. These methods may yield an on-target editing efficiency of greater than 50% and a frequency of off-target editing of less than 1.5% for one or more base editors under consideration

### Eukaryotic Cell Systems

[0132] Any of the target sequences of interest, e.g., the target sequences of the gRNAs of the methods for evaluating off-target effects disclosed herein, may be comprised within the genome of a eukaryotic cell, such as a mammalian cell. Accordingly, the target sequence and the third sequence may be comprised within the genome of a mammalian cell. The eukaryotic cell may comprise a murine or human cell, such as an HEK293T cell.

[0133] In some embodiments, the cell is a population of cells. Accordingly, in some embodiments, the step of sequencing comprises performing high-throughput sequencing of one or more regions of the genomes of the cells of the population that comprise the target sites and off-target sites that have complementarity to the gRNAs used in the systems.

[0134] In some aspects, eukaryotic cell systems for measuring off-target effects (e.g., off-target editing frequencies) of a base editor are provided. These systems may be used in accordance with the disclosed methods. Accordingly, provided herein are systems for determining the off-target editing frequency of a base editor comprising one or more eukaryotic cells each comprising i) a first nucleic acid molecule encoding a base editor comprising a napDNAbp domain; (ii) a second nucleic acid molecule encoding a first guide RNA that is engineered to bind to the napDNAbp domain of the base editor, wherein the first guide RNA comprises a first sequence of at least 10 contiguous nucleotides that is complementary to a target sequence; (iii) a third nucleic acid molecule encoding a nuclease inactive napDNAbp protein; and (iv) a fourth nucleic acid molecule encoding a second gRNA that is engineered to bind to the nuclease inactive napDNAbp protein, wherein the second guide RNA comprises a second sequence of at least 10 contiguous nucleotides that is complementary to a third sequence, whereby the first complex and second complex generate two or more R-loops, and wherein the third sequence has about 60% or less sequence identity to the target sequence.

[0135] The disclosed systems may further comprise a third, fourth, fifth, and/or sixth complex, wherein each of the third, fourth, fifth, and/or sixth complexes comprises (v) a second nuclease inactive napDNAbp protein, and (vi) a third guide RNA that is engineered to bind to the second nuclease inactive napDNAbp protein, wherein the third guide RNA comprises a fourth sequence of at least 10 contiguous nucleotides that is complementary to the third sequence. These complexes may be identical or essentially identical to each other, in that they are associated with identical or nearly identical gRNAs that have complementarity to the same off-target sequence. Any one of these complexes may be distinct or essentially identical to the second complex. The second and third guide RNA may share at least 95%, 98%, 98.5%, or 100% sequence identity, e.g., in the backbone of the guide RNA sequence. In certain embodiments, the second and third guide RNA share 100% identity or are the same. Likewise, the first nuclease inactive napDNAbp protein and the second nuclease inactive napDNAbp may be the same.

[0136] In some embodiments, any of the nuclease inactive napDNAbp proteins of the described systems may be a dead Cas9 (dCas9) protein. Accordingly, in some embodiments, the second complex comprises a first dCas9 protein, and the third and subsequent complexes comprise a second dCas9 protein. In some embodiments, the nuclease inactive napDNAbp protein of any of the described complexes is a dead Cas9 protein from S. aureus. See FIG. 2B. In some embodiments, the nuclease inactive napDNAbp protein is a dead Cas9 protein from S. pyogenes.

[0137] In some embodiments, the eukaryotic cells of the disclosed systems comprise mammalian cells. The eukaryotic cells may comprise human cells, e.g. HEK293T cells.

[0138] In some embodiments of these methods, transformed eukaryotic cells are sequenced to validate that mutations arise from C:G to T:A conversions. This sequencing step may be achieved by Sanger sequencing, high-throughput sequencing, whole genome sequencing, and/or other sequencing methods known in the art.

[0139] The on-target and Cas9-independent off-target editing rates of various base editors, such as CBEs and ABEs, may be compared by transforming any one of the disclosed eukaryotic cell systems with plasmids encoding these base editors in parallel, and evaluating the deamination rates at on-target and off-target sites for each base editor.

### Prokaryotic Cell Systems and Methods

[0140] In other aspects, provided herein are methods (or assays) and systems for evaluating the off-target effects of a base editor in a prokaryotic cell. In various embodiments, these systems are designed for determining the napDNAbp domain-independent (e.g. Cas9-independent) (or gRNA-independent) off-target editing effects of any one of the disclosed base editors.

[0141] Accordingly, provided herein are systems comprising one or more prokaryotic cells comprising (i) a nucleic acid molecule that contains a target sequence within a first inactive antibiotic resistance gene, wherein the target sequence within the first inactive antibiotic resistance gene contains a first mutant nucleotide base that yields an active antibiotic resistance gene conferring resistance to a first antibiotic when the first mutant nucleotide base is mutated to a different nucleotide base; (ii) a second nucleic acid molecule that contains a non-target sequence within a second inactive antibiotic resistance gene, wherein the non-target sequence within the second inactive antibiotic resistance gene contains a second mutant nucleotide base that yields an active antibiotic resistance gene conferring resistance to a second antibiotic when the second mutant nucleotide base is mutated to a different base; and (iii) a third nucleic acid molecule encoding a base editor and a guide RNA comprising a sequence of at least 10 contiguous nucleotides that is complementary to the target sequence within the first inactive antibiotic resistance gene. See FIG. 1A. These systems are designed to correct the mutations in the first inactive antibiotic resistance gene and/or the mutation in the second inactive antibiotic resistance gene and compare the frequencies of the mutation correction at each gene.

[0142] The non-target sequence of the disclosed bacterial cell systems may comprise a protospacer sequence that has about 70% or less sequence identity to the protospacer of the target sequence. The non-target sequence may comprise a protospacer sequence that has about 60% or less sequence identity to the target sequence. In other embodiments, the non-target sequence may comprise a protospacer sequence that has about 55% or less, 50% or less, 45% or less, 40% or less, 35% or less, or 30% or less sequence identity to the target sequence. The non-target sequence may comprise a protospacer sequence that differs from the protospacer of the target sequence in 5, 6, 7, 8, 9, 10, 11, 12, 13, 14, 15, or greater than 15 nucleotide positions (or has 3, 4, 5, 6, 7, 8, 9, 10, 11, 12, 13, 14, 15 or greater than 15 “mismatches” relative to the target sequence). In certain embodiments, the protospacer of the non-target sequence differs from the protospacer of the target sequence in 6 or more nucleotide positions.

[0143] The base editor of the disclosed systems may comprise a cytosine base editor (CBE). The base editor may comprise a Cas9 nickase domain. In certain embodiments, the base editor comprises an SpCas9 nickase (nSpCas9 or SpCas9n) domain. In other embodiments, the base editor comprises a nuclease inactive napDNAbp domain, such as a dCas9 domain. In certain embodiments, the base editor comprises a dSpCas9 domain.

[0144] In other embodiments, the base editor under evaluation in the disclosed prokaryotic systems may comprise an adenine base editor (ABE). In other embodiments, the base editor may comprise a transversion base editor, such as a C-to-G base editor (or “CGBE”), a G-to-T base editor (or “GTBE”), an A-to-T base editor (or “ATBE”), or an A-to-C base editor (or “ACBE”).

[0145] In some embodiments, the first nucleic acid molecule of (i) is comprised within a heterologous nucleic acid vector, such as a plasmid. In some embodiments, the second nucleic acid molecule of (ii) is comprised in the genome of the one or more bacterial cells.

[0146] In some embodiments, the first mutant nucleotide is a cytosine, such that mutating this cytosine to a thymine yields an active antibiotic resistance gene (e.g., chloramphenicol acetyltransferase) conferring resistance to the first antibiotic. The second mutant nucleotide may likewise be a cytosine, such that mutating this cytosine to a thymine yields an active antibiotic resistance gene (e.g., rpoB) conferring resistance to the second antibiotic, for instance yielding an active rpoB gene in the genome of the prokaryotic cell.

[0147] In some embodiments, the first antibiotic is chloramphenicol, tetracycline, carbenicillin, chloramphenicol, spectinomycin, or rifampin. In particular embodiments, the first antibiotic is chloramphenicol. In such embodiments, the first inactive antibiotic resistance gene may be the chloramphenicol acetyltransferase gene, or CAT, also known as Cm^{r}. In some embodiments, the second antibiotic is chloramphenicol, tetracycline, carbenicillin, chloramphenicol, spectinomycin, or rifampin. In particular embodiments, the second antibiotic is rifampin. In such embodiments, the second inactive antibiotic resistance gene may be the rpoB gene. CBE-catalyzed C:G-to-T:A mutations in the rpoB gene within E. coli genomes render these bacteria resistant to rifampin.

[0148] In some aspects, methods for measuring the off-target effects of a base editor for use in accordance with the disclosed prokaryotic (e.g., bacterial) cell systems are provided. Accordingly, provided herein are methods of determining off-target editing frequency of a base editor comprising: contacting a prokaryotic cell that comprises the second nucleic acid molecule, with (i) the first nucleic acid molecule and (ii) the third nucleic acid molecule; and further contacting the prokaryotic cell with a growth medium comprising the second antibiotic and/or the first antibiotic.

[0149] In some embodiments, the first antibiotic is chloramphenicol, tetracycline, carbenicillin, chloramphenicol, spectinomycin, or rifampin. In particular embodiments, the first antibiotic is chloramphenicol. In such embodiments, the first antibiotic resistance gene is chloramphenicol acetyltransferase, or CAT. In some embodiments, the second antibiotic is chloramphenicol, tetracycline, carbenicillin, chloramphenicol, spectinomycin, or rifampin. In particular embodiments, the second antibiotic is rifampin. In such embodiments, the second antibiotic resistance gene may be the rpoB gene.

[0150] In an exemplary embodiment of the disclosed methods for measuring the off-target effects in accordance with the disclosed prokaryotic cell systems, prokaryotic cells are transformed with i) a first plasmid encoding a cytosine base editor, and ii) a second plasmid encoding a (non-functional) Cm^{r} gene with an inactivating T:A-to-C:G point mutation, together with a guide RNA with complementarity to Cm^{r}, such that it can direct the CBE to correct this mutation. (No gRNAs with complementarity to the rpoB gene is provided.) Transformed cells are then plated on rifampin and chloramphenicol media. The prokaryotic cells comprise the rpoB gene within their genomes, and the frequency of deamination of the C:G to T:A in the rpoB gene, which confers rifampin resistance, reflects the magnitude of the Cas9-independent off-target frequency. Meanwhile, the magnitude of chloramphenicol resistance inactivation correction by CBE deamination reflects the on-target editing efficiency of the CBE. Accordingly, in the disclosed prokaryotic cell systems and methods, survival rates of colonies on chloramphenicol medium reflect on-target editing efficiency, and survival rates on rifampin medium reflect Cas9-independent deamination activity.

[0151] In some embodiments of these methods, the first and/or second antibiotic genes of the surviving prokaryotic colonies are sequenced to validate that mutations arise from C:G to T:A conversions.

[0152] The on-target and Cas9-independent off-target editing rates of various base editors, such as CBEs and ABEs, may be compared by transforming any one of the disclosed prokaryotic cell systems with plasmids encoding these base editors in parallel, and evaluating the survival rates of each colony on media comprising the first inactive antibiotic and second inactive antibiotic.

[0153] In other aspects of the prokaryotic cell systems, provided herein are systems comprising one or more prokaryotic cells comprising (i) a nucleic acid molecule that contains a target sequence within a gene encoding herpes simplex virus thymidine kinase (HSV-TK), wherein the target sequence contains a nucleotide base that inactivates the HSV-TK gene, thus conferring resistance to a growth medium, when the nucleotide base is mutated to a different nucleotide base; and (ii) a second nucleic acid molecule encoding a base editor (e.g., a CBE) and a guide RNA comprising a sequence of at least 10 contiguous nucleotides that is complementary to the target sequence. The HSV-TK kinase leads to toxicity in the presence of the nucleoside analog deoxyribofuranosyl)-3,4-dihydro-8H-pyrimido-[4,5-c][1,2]oxazin-7-one (“dP”) (34). Accordingly, in some embodiments, the growth medium of the disclosed systems may comprise dP. Off-target C:G-to-T:A mutations in the HSV-TK gene that inactivate the enzyme may lead to survival on medium containing dP.

[0154] Further provided are methods for evaluating off-target effects in accordance with the disclosed methods comprising transforming one or more prokaryotic cells with a plasmid comprising a gene encoding HSV-TK and a plasmid encoding a base editor (e.g., a CBE) and guide RNA; and contacting the transformed prokaryotic cells with medium containing 6-(β-D-2-Deoxyribofuranosyl)-3,4-dihydro-8H-pyrimido-[4,5-c][1,2]oxazin-7-one (dP). This medium may further comprise one or more antibiotics, such as carbenicillin and/or spectinomycin.

### Novel Cytosine Base Editors

[0155] In various embodiments, the present disclosure provides novel cytosine base editors (CBEs) comprising a napDNAbp domain and a cytidine deaminase domain that enzymatically deaminates a cytosine nucleobase of a C:G nucleobase pair to a uracil. The uracil may be subsequently converted to a thymine (T) by the cell's DNA repair and replication machinery. The mismatched guanine (G) on the opposite strand may subsequently be converted to an adenine (A) by the cell's DNA repair and replication machinery. In this manner, a target C:G nucleobase pair is ultimately converted to a T:A nucleobase pair.

[0156] The disclosed novel cytosine base editors exhibit increased on-target editing scope while maintaining minimized off-target DNA editing relative to existing CBEs. The CBEs described herein provide ˜10- to ˜100-fold lower average Cas9-independent off-target DNA editing, while maintaining efficient on-target editing at most positions targetable by existing CBEs. The disclosed novel CBEs comprise novel combinations of mutant cytidine deaminases, such as the YE1, YE2, YEE, and R33A deaminases, and Cas9 domains, and/or novel combinations of mutant cytidine deaminases, Cas9 domains, uracil glycosylase inhibitor (UGI) domains and nuclear localizations sequence (NLS) domains, relative to existing base editors. Existing base editors include BE3, which comprises the structure NH₂-[NLS]-[rAPOBEC1 deaminase]-[Cas9 nickase (D10A)]-[UGI domain]-[NLS]-COOH; BE4, which comprises the structure NH₂-[NLS]-[rAPOBEC1 deaminase]-[Cas9 nickase (D10A)]-[UGI domain]-[UGI domain]-[NLS]-COOH; and BE4max, which is a version of BE4 for which the codons of the base editor-encoding construct has been codon-optimized for expression in human cells.

[0157] Zuo et al. recently reported that, when overexpressed in mouse embryos and rice, BE3, the original CBE, induces an average random C:G-to-T:A mutation frequency of 5×10⁻⁸ per bp and 1.7×10⁻⁷ per bp, respectively. See “Cytosine base editor generates substantial off-target single-nucleotide variants in mouse embryos.” Science 364, 289-292 (2019), herein incorporated by reference. Editing was observed in sequences that had little to no similarity to the target sequences. These off-target edits may have arisen from the intrinsic DNA affinity of BE3's deaminase domain, independent of the guide RNA-programmed DNA binding of Cas9. See also Jin et al., Cytosine, but not adenine, base editors induce genome-wide off-target mutations in rice. Science 364, (2019), herein incorporated by reference.

[0158] Zuo et al. also found that Cas9-independent off-target editing events were enriched in transcribed regions of the genome, particularly in highly-expressed genes. Some of these were tumor suppressor genes. Accordingly, there is a need in the art to develop base editors that possess low off-target editing frequencies that may avoid undesired activation or inactivation of genes associated with diseases or disorders, such as cancer, and assays that rapidly measure the off-target editing frequencies of these base editors.

[0159] Exemplary CBEs may provide an off-target editing frequency of less than 2.0% after being contacted with a nucleic acid molecule comprising a target sequence, e.g., a target nucleobase pair. Further exemplary CBEs provide an off-target editing frequency of less than 1.5% after being contacted with a nucleic acid molecule comprising a target sequence comprising a target nucleobase pair. Further exemplary CBEs may provide an off-target editing frequency of less than 1.25%, less than 1.1%, less than 1%, less than 0.75%, less than 0.5%, less than 0.4%, less than 0.25%, less than 0.2%, less than 0.15%, less than 0.1%, less than 0.05%, or less than 0.025%, after being contacted with a nucleic acid molecule comprising a target sequence.

[0160] For instance, the novel cytosine base editors YE1-BE4, YE1-CP1028, YE1-SpCas9-NG (also referred to herein as YE1-NG), R33A-BE4, and R33A+K34A-BE4-CP1028, which are described below, may exhibit off-target editing frequencies of less than 0.75% (e.g., about 0.4% or less) while maintaining on-target editing efficiencies of about 60% or more, in target sequences in mammalian cells. Each of these base editors comprises modified cytidine deaminases (e.g., YE1, R33A, or R33A+K34A) and may further comprise a modified napDNAbp domain such as a circularly permuted Cas9 domain (e.g., CP1028) or a Cas9 domain with an expanded PAM window (e.g., SpCas9-NG). These five base editors may be the most preferred for applications in which off-target editing, and in particular Cas9-independent off-target editing, must be minimized. In particular, base editors comprising a YE1 deaminase domain provide efficient on-target editing with greatly decreased Cas9-independent editing, as confirmed by whole-genome sequencing (see FIGS. 3A and 3B).

[0161] Exemplary CBEs may further possess an on-target editing efficiency of more than 50% after being contacted with a nucleic acid molecule comprising a target sequence. Further exemplary CBEs possess an on-target editing efficiency of more than 60% after being contacted with a nucleic acid molecule comprising a target sequence. Further exemplary CBEs possess an on-target editing efficiency of more than 65%, more than 70%, more than 75%, more than 80%, more than 82.5%, or more than 85% after being contacted with a nucleic acid molecule comprising a target sequence.

[0162] The disclosed CBEs may exhibit indel frequencies of less than 0.75%, less than 0.6%, less than 0.5%, less than 0.4%, less than 0.3%, or less than 0.2% after being contacted with a nucleic acid molecule containing a target sequence. The disclosed CBEs may further exhibit reduced RNA off-target editing relative to existing CBEs. The disclosed CBEs may further result in increased product purity after being contacted with a nucleic acid molecule containing a target sequence relative to existing CBEs.

[0163] The disclosed CBEs may further comprise one or more nuclear localization signals (NLSs) and/or two or more uracil glycosylase inhibitor (UGI) domains. Thus, the base editors may comprise the structure: NH₂-[first nuclear localization sequence]-[cytidine deaminase domain]-[napDNAbp domain]-[first UGI domain]-[second UGI domain]-[second nuclear localization sequence]-COOH, wherein each instance of “]-[” indicates the presence of an optional linker sequence. Exemplary CBEs may have a structure that comprises the “BE4max” architecture, with an NH₂-[NLS]-[cytidine deaminase]-[Cas9 nickase]-[UGI domain]-[UGI domain]-[NLS]-COOH structure, having optimized nuclear localization signals and wherein the napDNAbp domain comprises a Cas9 nickase. See FIG. 2A. This BE4max structure was reported to have optimized codon usage for expression in human cells, as reported in Koblan et al., Nat Biotechnol. 2018; 36(9):843-846, herein incorporated by reference.

[0164] In other embodiments, exemplary CBEs may have a structure that comprises a modified BE4max architecture that contains a napDNAbp domain comprising a Cas9 variant other than Cas9 nickase, such as SpCas9-NG, xCas9, or circular permutant CP1028. Accordingly, exemplary CBEs may comprise the structure: NH₂-[NLS]-[cytidine deaminase]-[CP1028]-[UGI domain]-[UGI domain]-[NLS]-COOH; NH₂-[NLS]-[cytidine deaminase]-[xCas9]-[UGI domain]-[UGI domain]-[NLS]-COOH; or NH₂-[NLS]-[cytidine deaminase]-[SpCas9-NG]-[UGI domain]-[UGI domain]-[NLS]-COOH, wherein each instance of “]-[” indicates the presence of an optional linker sequence.

[0165] In some embodiments, the napDNAbp domain comprises an amino acid sequence that has at least 80%, 85%, 90%, 92.5%, 95%, 98%, or 99.5% sequence identity with SEQ ID NO: 226. In some embodiments, the napDNAbp domain comprises the amino acid sequence of SEQ ID NO: 226. In some embodiments, the napDNAbp domain comprises an amino acid sequence that has at least 80%, 85%, 90%, 92.5%, 95%, 98%, or 99.5% sequence identity with SEQ ID NO: 235. In some embodiments, the napDNAbp domain comprises the amino acid sequence of SEQ ID NO: 235. In some embodiments, the napDNAbp domain comprises an amino acid sequence that has at least 80%, 85%, 90%, 92.5%, 95%, 98%, or 99.5% sequence identity with any one of SEQ ID NOs: 236 or 237. In some embodiments, the napDNAbp domain comprises the amino acid sequence of SEQ ID NO: 236 or 237.

[0166] In some embodiments, the UGI domain of any one of the disclosed base editors comprises an amino acid sequence having at least 95% sequence identity to SEQ ID NO: 292. In some embodiments, the UGI domain of any one of the disclosed base editors comprises the amino acid sequence of SEQ ID NO: 292.

[0167] The disclosed CBEs may comprise modified (or evolved) cytidine deaminase domains, such as deaminase domains that recognize an expanded PAM sequence, have improved efficiency of deaminating 5′-GC targets, and/or make edits in a narrower target window, In some embodiments, the disclosed cytosine base editors comprise evolved nucleic acid programmable DNA binding proteins (napDNAbp), such as an evolved Cas9.

[0168] Exemplary cytosine base editors comprise sequences that are at least 85%, at least 90%, at least 95%, at least 98%, at least 99%, or at least 99.5% identical to the following amino acid sequences, SEQ ID NOs: 257-282.

[0169] The cytidine deaminase domains of the disclosed cytosine base editors may comprise variants of wild-type cytidine deaminases. These variants may comprise an amino acid sequence that is at least about 70% identical, at least about 80% identical, at least about 90% identical, at least about 95% identical, at least about 96% identical, at least about 97% identical, at least about 98% identical, at least about 99% identical, at least about 99.5% identical, or at least about 99.9% identical to the wild type deaminase. In some embodiments, any of the cytidine deaminase domains may comprise an amino acid sequence having 1, 2, 3, 4, 5, 6, 7, 8, 9, 10, 11, 12, 13, 14, 15, 16, 17, 18, 19, 20, 25, 30, or more than 30 amino acids that differ relative to the amino acid sequence of the wild type enzyme. These differences may comprise nucleotides that have been inserted, deleted, or substituted relative to the amino acid sequence of the wild type enzyme. In some embodiments, the disclosed cytidine deaminase domains contain stretches of about 50, about 75, about 100, about 125, about 150, about 175, about 200, about 300, about 400, about 500, or more than 500 consecutive amino acids in common with the wild type enzyme. In some embodiments, the cytidine deaminase domains comprise truncations at the N-terminus or C-terminus relative to the wild-type enzyme.

[0170] Where indicated, “—BE4” refers to the BE4max architecture, or NH₂-[first nuclear localization sequence]-[cytidine deaminase domain]-[32aa linker]-[SpCas9 nickase (nCas9, or nSpCas9) domain]-[9aa linker]-[first UGI domain]-[9aa-linker]-[second UGI domain]-[second nuclear localization sequence]-COOH. Where indicated, “BE4max, modified with SpCas9-NG” and “—SpCas9-NG” refer to a modified BE4max architecture in which the SpCas9 nickase domain has been replaced with an SpCas9-NG, i.e., NH₂-[first nuclear localization sequence]-[cytidine deaminase domain]-[32aa linker]-[SpCas9-NG]-[9aa linker]-[first UGI domain]-[9aa-linker]-[second UGI domain]-[second nuclear localization sequence]-COOH. And where indicated, “BE4-CP1028” refers to a modified BE4max architecture in which the Cas9 nickase domain has been replaced with a S. pyogenes CP1028, i.e., NH₂-[first nuclear localization sequence]-[cytidine deaminase domain]-[32aa linker]-[CP1028]-[9aa linker]-[first UGI domain]-[9aa-linker]-[second UGI domain]-[second nuclear localization sequence]-COOH.

[0171] As discussed above, preferred base editors comprise modified cytidine deaminases (e.g., YE1, R33A, or R33A+K34A) and may further comprise a modified napDNAbp domain such as a circularly permuted Cas9 domain (e.g., CP1028) or a Cas9 domain with an expanded PAM window (e.g., SpCas9-NG). The napDNAbp domains in the following amino acid sequences are indicated in italics.

BE4max
(SEQ ID NO: 257)
MKRTADGSEFESPKKKRKVSSETGPVAVDPTLRRRIEPHEFEVFFDPRELRKETCLLYEINWG
GRHSIWRHTSQNTNKHVEVNFIEKFTTERYFCPNTRCSITWFLSWSPCGECSRAITEFLSRYP
HVTLFIYIARLYHHADPRNRQGLRDLISSGVTIQIMTEQESGYCWRNFVNYSPSNEAHWPRY
PHLWVRLYVLELYCIILGLPPCLNILRRKQPQLTFFTIALQSCHYQRLPPHILWATGLKSGGSS
GGSSGSETPGTSESATPESSGGSSGGSDKKYSIGLAIGTNSVGWAVITDEYKVPSKKFKVLGNTDR
HSIKKNLIGALLFDSGETAEATRLKRTARRRYTRRKNRICYLQEIFSNEMAKVDDSFFHRLEESFLV
EEDKKHERHPIFGNIVDEVAYHEKYPTIYHLRKKLVDSTDKADLRLIYLALAHMIKFRGHFLIEGD
LNPDNSDVDKLFIQLVQTYNQLFEENPINASGVDAKAILSARLSKSRRLENLIAQLPGEKKNGLFG
NLIALSLGLTPNFKSNFDLAEDAKLQLSKDTYDDDLDNLLAQIGDQYADLFLAAKNLSDAILLSDIL
RVNTEITKAPLSASMIKRYDEHHQDLTLLKALVRQQLPEKYKEIFFDQSKNGYAGYIDGGASQEEF
YKFIKPILEKMDGTEELLVKLNREDLLRKQRTFDNGSIPHQIHLGELHAILRRQEDFYPFLKDNRE
KIEKILTFRIPYYVGPLARGNSRFAWMTRKSEETITPWNFEEVVDKGASAQSFIERMTNFDKNLPN
EKVLPKHSLLYEYFTVYNELTKVKYVTEGMRKPAFLSGEQKKAIVDLLFKTNRKVTVKQLKEDYF
KKIECFDSVEISGVEDRFNASLGTYHDLLKIIKDKDFLDNEENEDILEDIVLTLTLFEDREMIEERL
KTYAHLFDDKVMKQLKRRRYTGWGRLSRKLINGIRDKQSGKTILDFLKSDGFANRNFMQLIHDD
SLTFKEDIQKAQVSGQGDSLHEHIANLAGSPAIKKGILQTVKVVDELVKVMGRHKPENIVIEMARE
NQTTQKGQKNSRERMKRIEEGIKELGSQILKEHPVENTQLQNEKLYLYYLQNGRDMYVDQELDI
NRLSDYDVDHIVPQSFLKDDSIDNKVLTRSDKNRGKSDNVPSEEVVKKMKNYWRQLLNAKLITQR
KFDNLTKAERGGLSELDKAGFIKRQLVETRQITKHVAQILDSRMNTKYDENDKLIREVKVITLKSK
LVSDFRKDFQFYKVREINNYHHAHDAYLNAVVGTALIKKYPKLESEFVYGDYKVYDVRKMIAKSE
QEIGKATAKYFFYSNIMNFFKTEITLANGEIRKRPLIETNGETGEIVWDKGRDFATVRKVLSMPQV
NIVKKTEVQTGGFSKESILPKRNSDKLIARKKDWDPKKYGGFDSPTVAYSVLVVAKVEKGKSKKLK
SVKELLGITIMERSSFEKNPIDFLEAKGYKEVKKDLIIKLPKYSLFELENGRKRMLASAGELQKGNE
LALPSKYVNFLYLASHYEKLKGSPEDNEQKQLFVEQHKHYLDEIIEQISEFSKRVILADANLDKVLS
AYNKHRDKPIREQAENIIHLFTLTNLGAPAAFKYFDTTIDRKRYTSTKEVLDATLIHQSITGLYETRI
DLSQLGGDSGGSGGSGGSTNLSDIIEKETGKQLVIQESILMLPEEVEEVIGNKPESDILVHTAY
DESTDENVMLLTSDAPEYKPWALVIQDSNGENKIKMLSGGSGGSGGSTNLSDIIEKETGKQL
VIQESILMLPEEVEEVIGNKPESDILVHTAYDESTDENVMLLTSDAPEYKPWALVIQDSNGEN
KIKMLSGGSKRTADGSEFEPKKKRKV
YE1-BE4
(SEQ ID NO: 258)
MKRTADGSEFESPKKKRKVSSETGPVAVDPTLRRRIEPHEFEVFFDPRELRKETCLLYEINWG
GRHSIWRHTSQNTNKHVEVNFIEKFTTERYFCPNTRCSITWFLSYSPCGECSRAITEFLSRYP
HVTLFIYIARLYHHADPENRQGLRDLISSGVTIQIMTEQESGYCWRNFVNYSPSNEAHWPRY
PHLWVRLYVLELYCIILGLPPCLNILRRKQPQLTFFTIALQSCHYQRLPPHILWATGLKSGGSS
GGSSGSETPGTSESATPESSGGSSGGSDKKYSIGLAIGTNSVGWAVITDEYKVPSKKFKVLGNTDR
HSIKKNLIGALLFDSGETAEATRLKRTARRRYTRRKNRICYLQEIFSNEMAKVDDSFFHRLEESFLV
EEDKKHERHPIFGNIVDEVAYHEKYPTIYHLRKKLVDSTDKADLRLIYLALAHMIKFRGHFLIEGD
LNPDNSDVDKLFIQLVQTYNQLFEENPINASGVDAKAILSARLSKSRRLENLIAQLPGEKKNGLFG
NLIALSLGLTPNFKSNFDLAEDAKLQLSKDTYDDDLDNLLAQIGDQYADLFLAAKNLSDAILLSDIL
RVNTEITKAPLSASMIKRYDEHHQDLTLLKALVRQQLPEKYKEIFFDQSKNGYAGYIDGGASQEEF
YKFIKPILEKMDGTEELLVKLNREDLLRKQRTFDNGSIPHQIHLGELHAILRRQEDFYPFLKDNRE
KIEKILTFRIPYYVGPLARGNSRFAWMTRKSEETITPWNFEEVVDKGASAQSFIERMTNFDKNLPN
EKVLPKHSLLYEYFTVYNELTKVKYVTEGMRKPAFLSGEQKKAIVDLLFKTNRKVTVKQLKEDYF
KKIECFDSVEISGVEDRFNASLGTYHDLLKIIKDKDFLDNEENEDILEDIVLTLTLFEDREMIEERL
KTYAHLFDDKVMKQLKRRRYTGWGRLSRKLINGIRDKQSGKTILDFLKSDGFANRNFMQLIHDD
SLTFKEDIQKAQVSGQGDSLHEHIANLAGSPAIKKGILQTVKVVDELVKVMGRHKPENIVIEMARE
NQTTQKGQKNSRERMKRIEEGIKELGSQILKEHPVENTQLQNEKLYLYYLQNGRDMYVDQELDI
NRLSDYDVDHIVPQSFLKDDSIDNKVLTRSDKNRGKSDNVPSEEVVKKMKNYWRQLLNAKLITQR
KFDNLTKAERGGLSELDKAGFIKRQLVETRQITKHVAQILDSRMNTKYDENDKLIREVKVITLKSK
LVSDFRKDFQFYKVREINNYHHAHDAYLNAVVGTALIKKYPKLESEFVYGDYKVYDVRKMIAKSE
QEIGKATAKYFFYSNIMNFFKTEITLANGEIRKRPLIETNGETGEIVWDKGRDFATVRKVLSMPQV
NIVKKTEVQTGGFSKESILPKRNSDKLIARKKDWDPKKYGGFDSPTVAYSVLVVAKVEKGKSKKLK
SVKELLGITIMERSSFEKNPIDFLEAKGYKEVKKDLIIKLPKYSLFELENGRKRMLASAGELQKGNE
LALPSKYVNFLYLASHYEKLKGSPEDNEQKQLFVEQHKHYLDEIIEQISEFSKRVILADANLDKVLS
AYNKHRDKPIREQAENIIHLFTLTNLGAPAAFKYFDTTIDRKRYTSTKEVLDATLIHQSITGLYETRI
DLSQLGGDSGGSGGSGGSTNLSDIIEKETGKQLVIQESILMLPEEVEEVIGNKPESDILVHTAY
DESTDENVMLLTSDAPEYKPWALVIQDSNGENKIKMLSGGSGGSGGSTNLSDIIEKETGKQL
VIQESILMLPEEVEEVIGNKPESDILVHTAYDESTDENVMLLTSDAPEYKPWALVIQDSNGEN
KIKMLSGGSKRTADGSEFEPKKKRKV
YE2-BE4
(SEQ ID NO: 259)
MKRTADGSEFESPKKKRKVSSETGPVAVDPTLRRRIEPHEFEVFFDPRELRKETCLLYEINWG
GRHSIWRHTSQNTNKHVEVNFIEKFTTERYFCPNTRCSITWFLSYSPCGECSRAITEFLSRYP
HVTLFIYIARLYHHADPRNRQGLEDLISSGVTIQIMTEQESGYCWRNFVNYSPSNEAHWPRY
PHLWVRLYVLELYCIILGLPPCLNILRRKQPQLTFFTIALQSCHYQRLPPHILWATGLKSGGSS
GGSSGSETPGTSESATPESSGGSSGGSDKKYSIGLAIGTNSVGWAVITDEYKVPSKKFKVLGNTDR
HSIKKNLIGALLFDSGETAEATRLKRTARRRYTRRKNRICYLQEIFSNEMAKVDDSFFHRLEESFLV
EEDKKHERHPIFGNIVDEVAYHEKYPTIYHLRKKLVDSTDKADLRLIYLALAHMIKFRGHFLIEGD
LNPDNSDVDKLFIQLVQTYNQLFEENPINASGVDAKAILSARLSKSRRLENLIAQLPGEKKNGLFG
NLIALSLGLTPNFKSNFDLAEDAKLQLSKDTYDDDLDNLLAQIGDQYADLFLAAKNLSDAILLSDIL
RVNTEITKAPLSASMIKRYDEHHQDLTLLKALVRQQLPEKYKEIFFDQSKNGYAGYIDGGASQEEF
YKFIKPILEKMDGTEELLVKLNREDLLRKQRTFDNGSIPHQIHLGELHAILRRQEDFYPFLKDNRE
KIEKILTFRIPYYVGPLARGNSRFAWMTRKSEETITPWNFEEVVDKGASAQSFIERMTNFDKNLPN
EKVLPKHSLLYEYFTVYNELTKVKYVTEGMRKPAFLSGEQKKAIVDLLFKTNRKVTVKQLKEDYF
KKIECFDSVEISGVEDRFNASLGTYHDLLKIIKDKDFLDNEENEDILEDIVLTLTLFEDREMIEERL
KTYAHLFDDKVMKQLKRRRYTGWGRLSRKLINGIRDKQSGKTILDFLKSDGFANRNFMQLIHDD
SLTFKEDIQKAQVSGQGDSLHEHIANLAGSPAIKKGILQTVKVVDELVKVMGRHKPENIVIEMARE
NQTTQKGQKNSRERMKRIEEGIKELGSQILKEHPVENTQLQNEKLYLYYLQNGRDMYVDQELDI
NRLSDYDVDHIVPQSFLKDDSIDNKVLTRSDKNRGKSDNVPSEEVVKKMKNYWRQLLNAKLITQR
KFDNLTKAERGGLSELDKAGFIKRQLVETRQITKHVAQILDSRMNTKYDENDKLIREVKVITLKSK
LVSDFRKDFQFYKVREINNYHHAHDAYLNAVVGTALIKKYPKLESEFVYGDYKVYDVRKMIAKSE
QEIGKATAKYFFYSNIMNFFKTEITLANGEIRKRPLIETNGETGEIVWDKGRDFATVRKVLSMPQV
NIVKKTEVQTGGFSKESILPKRNSDKLIARKKDWDPKKYGGFDSPTVAYSVLVVAKVEKGKSKKLK
SVKELLGITIMERSSFEKNPIDFLEAKGYKEVKKDLIIKLPKYSLFELENGRKRMLASAGELQKGNE
LALPSKYVNFLYLASHYEKLKGSPEDNEQKQLFVEQHKHYLDEIIEQISEFSKRVILADANLDKVLS
AYNKHRDKPIREQAENIIHLFTLTNLGAPAAFKYFDTTIDRKRYTSTKEVLDATLIHQSITGLYETRI
DLSQLGGDSGGSGGSGGSTNLSDIIEKETGKQLVIQESILMLPEEVEEVIGNKPESDILVHTAY
DESTDENVMLLTSDAPEYKPWALVIQDSNGENKIKMLSGGSGGSGGSTNLSDIIEKETGKQL
VIQESILMLPEEVEEVIGNKPESDILVHTAYDESTDENVMLLTSDAPEYKPWALVIQDSNGEN
KIKMLSGGSKRTADGSEFEPKKKRKV
YEE-BE4
(SEQ ID NO: 260)
MKRTADGSEFESPKKKRKVSSETGPVAVDPTLRRRIEPHEFEVFFDPRELRKETCLLYEINWG
GRHSIWRHTSQNTNKHVEVNFIEKFTTERYFCPNTRCSITWFLSYSPCGECSRAITEFLSRYP
HVTLFIYIARLYHHADPENRQGLEDLISSGVTIQIMTEQESGYCWRNFVNYSPSNEAHWPRY
PHLWVRLYVLELYCIILGLPPCLNILRRKQPQLTFFTIALQSCHYQRLPPHILWATGLKSGGSS
GGSSGSEEPGESESAEPESSGGSSGGSDKKYSIGLAIGTNSVGWAVITDEYKVPSKKFKVLGNTDR
HSIKKNLIGALLFDSGETAEATRLKRTARRRYTRRKNRICYLQEIFSNEMAKVDDSFFHRLEESFLV
EEDKKHERHPIFGNIVDEVAYHEKYPTIYHLRKKLVDSTDKADLRLIYLALAHMIKFRGHFLIEGD
LNPDNSDVDKLFIQLVQTYNQLFEENPINASGVDAKAILSARLSKSRRLENLIAQLPGEKKNGLFG
NLIALSLGLTPNFKSNFDLAEDAKLQLSKDTYDDDLDNLLAQIGDQYADLFLAAKNLSDAILLSDIL
RVNTEITKAPESASMIKRYDEHHQDLTLLKALVRQQLPEKYKEIFFDQSKNGYAGYIDGGASQEEF
YKFIKPILEKMDGTEELLVKLNREDLLRKQRTFDNGSIPHQIHLGELHAILRRQEDFYPFLKDNRE
KIEKILTFRIPYYVGPLARGNSRFAWMTRKSEETITPWNFEEVVDKGASAQSFIERMTNFDKNLPN
EKVLPKHSLLYEYFTVYNELTKVKYVTEGMRKPAFLSGEQKKAIVDLLFKTNRKVTVKQLKEDYF
KKIECFDSVEISGVEDRFNASLGTYHDLLKIIKDKDFLDNEENEDILEDIVLTLTLFEDREMIEERL
KTYAHLFDDKVMKQLKRRRYTGWGRLSRKLINGIRDKQSGKTILDFLKSDGFANRNFMQLIHDD
SLTFKEDIQKAQVSGQGDSLHEHIANLAGSPAIKKGILQTVKVVDELVKVMGRHKPENIVIEMARE
NQTTQKGQKNSRERMKRIEEGIKELGSQILKEHPVENTQEQNEKLYLYYLQNGRDMYVDQELDI
NRLSDYDVDHIVPQSFLKDDSIDNKVLTRSDKNRGKSDNVPSEEVVKKMKNYWRQLLNAKLITQR
KFDNLTKAERGGLSELDKAGFIKRQLVETRQITKHVAQILDSRMNTKYDENDKLIREVKVITLKSK
LVSDFRKDFQFYKVREINNYHHAHDAYLNAVVGTALIKKYPKLESEFVYGDYKVYDVRKMIAKSE
QEIGKATAKYFFYSNIMNFFKTEITLANGEIRKRPLIETNGETGEIVWDKGRDFATVRKVLSMPQV
NIVKKTEVQTGGFSKESILPKRNSDKLIARKKDWDPKKYGGFDSPTVAYSVLVVAKVEKGKSKKLK
SVKELLGITIMERSSFEKNPIDFLEAKGYKEVKKDLIIKLPKYSLFELENGRKRMLASAGELQKGNE
LALPSKYVNFLYLASHYEKLKGSPEDNEQKQLFVEQHKHYLDEIIEQISEFSKRVILADANLDKVLS
AYNKHRDKPIREQAENIIHLFTLTNLGAPAAFKYFDTTIDRKRYTSTKEVLDATLIHQSITGLYETRI
DLSQLGGDSGGSGGSGGSTNLSDIIEKETGKQLVIQESILMLPEEVEEVIGNKPESDILVHTAY
DESTDENVMLLTSDAPEYKPWALVIQDSNGENKIKMLSGGSGGSGGSTNLSDIIEKETGKQL
VIQESILMLPEEVEEVIGNKPESDILVHTAYDESTDENVMLLTSDAPEYKPWALVIQDSNGEN
KIKMLSGGSKRTADGSEFEPKKKRKV
EE-BE4
(SEQ ID NO: 261)
MKRTADGSEFESPKKKRKVSSETGPVAVDPTLRRRIEPHEFEVFFDPRELRKETCLLYEINWG
GRHSIWRHTSQNTNKHVEVNFIEKFTTERYFCPNTRCSITWFLSWSPCGECSRAITEFLSRYP
HVTLFIYIARLYHHADPENRQGLEDLISSGVTIQIMTEQESGYCWRNFVNYSPSNEAHWPRY
PHLWVRLYVLELYCIILGLPPCLNILRRKQPQLTFFTIALQSCHYQRLPPHILWATGLKSGGSS
GGSSGSEYPGYSESAYPESSGGSSGGSDKKYSIGLAIGTNSVGWAVITDEYKVPSKKFKVLGNTDR
HSIKKNLIGALLFDSGETAEATRLKRTARRRYTRRKNRICYLQEIFSNEMAKVDDSFFHRLEESFLV
EEDKKHERHPIFGNIVDEVAYHEKYPTIYHLRKKLVDSTDKADLRLIYLALAHMIKFRGHFLIEGD
LNPDNSDVDKLFIQLVQTYNQLFEENPINASGVDAKAILSARLSKSRRLENLIAQLPGEKKNGLFG
NLIALSLGLTPNFKSNFDLAEDAKLQLSKDTYDDDLDNLLAQIGDQYADLFLAAKNLSDAILLSDIL
RVNTEITKAPLSASMIKRYDEHHQDLTLLKALVRQQLPEKYKEIFFDQSKNGYAGYIDGGASQEEF
YKFIKPILEKMDGTEELLVKLNREDLLRKQRTFDNGSIPHQIHLGELHAILRRQEDFYPFLKDNRE
KIEKILTFRIPYYVGPLARGNSRFAWMTRKSEETITPWNFEEVVDKGASAQSFIERMTNFDKNLPN
EKVLPKHSLLYEYFTVYNELTKVKYVTEGMRKPAFLSGEQKKAIVDLLFKTNRKVTVKQLKEDYF
KKIECFDSVEISGVEDRFNASLGTYHDLLKIIKDKDFLDNEENEDILEDIVLTLTLFEDREMIEERL
KTYAHLFDDKVMKQLKRRRYTGWGRLSRKLINGIRDKQSGKTILDFLKSDGFANRNFMQLIHDD
SLTFKEDIQKAQVSGQGDSLHEHIANLAGSPAIKKGILQTVKVVDELVKVMGRHKPENIVIEMARE
NQTTQKGQKNSRERMKRIEEGIKELGSQILKEHPVENTQEQNEKLYLYYLQNGRDMYVDQELDI
NRLSDYDVDHIVPQSFLKDDSIDNKVLTRSDKNRGKSDNVPSEEVVKKMKNYWRQLLNAKLITQR
KFDNLTKAERGGLSELDKAGFIKRQLVETRQITKHVAQILDSRMNTKYDENDKLIREVKVITLKSK
LVSDFRKDFQFYKVREINNYHHAHDAYLNAVVGTALIKKYPKLESEFVYGDYKVYDVRKMIAKSE
QEIGKATAKYFFYSNIMNFFKTEITLANGEIRKRPLIETNGETGEIVWDKGRDFATVRKVLSMPQV
NIVKKTEVQTGGFSKESILPKRNSDKLIARKKDWDPKKYGGFDSPTVAYSVLVVAKVEKGKSKKLK
SVKELLGITIMERSSFEKNPIDFLEAKGYKEVKKDLIIKLPKYSLFELENGRKRMLASAGELQKGNE
LALPSKYVNFLYLASHYEKLKGSPEDNEQKQLFVEQHKHYLDEIIEQISEFSKRVILADANLDKVLS
AYNKHRDKPIREQAENIIHLFTLTNLGAPAAFKYFDTTIDRKRYTSTKEVLDATLIHQSITGLYETRI
DLSQLGGDSGGSGGSGGSTNLSDIIEKETGKQLVIQESILMLPEEVEEVIGNKPESDILVHTAY
DESTDENVMLLTSDAPEYKPWALVIQDSNGENKIKMLSGGSGGSGGSTNLSDIIEKETGKQL
VIQESILMLPEEVEEVIGNKPESDILVHTAYDESTDENVMLLTSDAPEYKPWALVIQDSNGEN
KIKMLSGGSKRTADGSEFEPKKKRKV
R33A-BE4
(SEQ ID NO: 262)
MKRTADGSEFESPKKKRKVSSETGPVAVDPTLRRRIEPHEFEVFFDPRELAKETCLLYEINWG
GRHSIWRHTSQNTNKHVEVNFIEKFTTERYFCPNTRCSITWFLSWSPCGECSRAITEFLSRYP
HVTLFIYIARLYHHADPRNRQGLRDLISSGVTIQIMTEQESGYCWRNFVNYSPSNEAHWPRY
PHLWVRLYVLELYCIILGLPPCLNILRRKQPQLTFFTIALQSCHYQRLPPHILWATGLKSGGSS
GGSSGSEYPGYSESAYPESSGGSSGGSDKKYSIGLAIGTNSVGWAVITDEYKVPSKKFKVLGNTDR
HSIKKNLIGALLFDSGETAEATRLKRTARRRYTRRKNRICYLQEIFSNEMAKVDDSFFHRLEESFLV
EEDKKHERHPIFGNIVDEVAYHEKYPTIYHLRKKLVDSTDKADLRLIYLALAHMIKFRGHFLIEGD
LNPDNSDVDKLFIQLVQTYNQLFEENPINASGVDAKAILSARLSKSRRLENLIAQLPGEKKNGLFG
NLIALSLGLTPNFKSNFDLAEDAKLQLSKDTYDDDLDNLLAQIGDQYADLFLAAKNLSDAILLSDIL
RVNTEITKAPLSASMIKRYDEHHQDLTLLKALVRQQLPEKYKEIFFDQSKNGYAGYIDGGASQEEF
YKFIKPILEKMDGTEELLVKLNREDLLRKQRTFDNGSIPHQIHLGELHAILRRQEDFYPFLKDNRE
KIEKILTFRIPYYVGPLARGNSRFAWMTRKSEETITPWNFEEVVDKGASAQSFIERMTNFDKNLPN
EKVLPKHSLLYEYFTVYNELTKVKYVTEGMRKPAFLSGEQKKAIVDLLFKTNRKVTVKQLKEDYF
KKIECFDSVEISGVEDRFNASLGTYHDLLKIIKDKDFLDNEENEDILEDIVLTLTLFEDREMIEERL
KTYAHLFDDKVMKQLKRRRYTGWGRLSRKLINGIRDKQSGKTILDFLKSDGFANRNFMQLIHDD
SLTFKEDIQKAQVSGQGDSLHEHIANLAGSPAIKKGILQTVKVVDELVKVMGRHKPENIVIEMARE
NQTTQKGQKNSRERMKRIEEGIKELGSQILKEHPVENTQEQNEKLYLYYLQNGRDMYVDQELDI
NRLSDYDVDHIVPQSFLKDDSIDNKVLTRSDKNRGKSDNVPSEEVVKKMKNYWRQLLNAKLITQR
KFDNLTKAERGGLSELDKAGFIKRQLVETRQITKHVAQILDSRMNTKYDENDKLIREVKVITLKSK
LVSDFRKDFQFYKVREINNYHHAHDAYLNAVVGTALIKKYPKLESEFVYGDYKVYDVRKMIAKSE
QEIGKATAKYFFYSNIMNFFKTEITLANGEIRKRPLIETNGETGEIVWDKGRDFATVRKVLSMPQV
NIVKKTEVQTGGFSKESILPKRNSDKLIARKKDWDPKKYGGFDSPTVAYSVLVVAKVEKGKSKKLK
SVKELLGITIMERSSFEKNPIDFLEAKGYKEVKKDLIIKLPKYSLFELENGRKRMLASAGELQKGNE
LALPSKYVNFLYLASHYEKLKGSPEDNEQKQLFVEQHKHYLDEIIEQISEFSKRVILADANLDKVLS
AYNKHRDKPIREQAENIIHLFTLTNLGAPAAFKYFDTTIDRKRYTSTKEVLDATLIHQSITGLYETRI
DLSQLGGDSGGSGGSGGSTNLSDIIEKETGKQLVIQESILMLPEEVEEVIGNKPESDILVHTAY
DESTDENVMLLTSDAPEYKPWALVIQDSNGENKIKMLSGGSGGSGGSTNLSDIIEKETGKQL
VIQESILMLPEEVEEVIGNKPESDILVHTAYDESTDENVMLLTSDAPEYKPWALVIQDSNGEN
KIKMLSGGSKRTADGSEFEPKKKRKV
R33A + K34A-BE4
(SEQ ID NO: 263)
MKRTADGSEFESPKKKRKVSSETGPVAVDPTLRRRIEPHEFEVFFDPRELAAETCLLYEINWG
GRHSIWRHTSQNTNKHVEVNFIEKFTTERYFCPNTRCSITWFLSWSPCGECSRAITEFLSRYP
HVTLFIYIARLYHHADPRNRQGLRDLISSGVTIQIMTEQESGYCWRNFVNYSPSNEAHWPRY
PHLWVRLYVLELYCIILGLPPCLNILRRKQPQLTFFTIALQSCHYQRLPPHILWATGLKSGGSS
GGSSGSEYPGYSESAYPESSGGSSGGSDKKYSIGLAIGTNSVGWAVITDEYKVPSKKFKVLGNTDR
HSIKKNLIGALLFDSGETAEATRLKRTARRRYTRRKNRICYLQEIFSNEMAKVDDSFFHRLEESFLV
EEDKKHERHPIFGNIVDEVAYHEKYPTIYHLRKKLVDSTDKADLRLIYLALAHMIKFRGHFLIEGD
LNPDNSDVDKLFIQLVQTYNQLFEENPINASGVDAKAILSARLSKSRRLENLIAQLPGEKKNGLFG
NLIALSLGLTPNFKSNFDLAEDAKLQLSKDTYDDDLDNLLAQIGDQYADLFLAAKNLSDAILLSDIL
RVNTEITKAPLSASMIKRYDEHHQDLTLLKALVRQQLPEKYKEIFFDQSKNGYAGYIDGGASQEEF
YKFIKPILEKMDGTEELLVKLNREDLLRKQRTFDNGSIPHQIHLGELHAILRRQEDFYPFLKDNRE
KIEKILTFRIPYYVGPLARGNSRFAWMTRKSEETITPWNFEEVVDKGASAQSFIERMTNFDKNLPN
EKVLPKHSLLYEYFTVYNELTKVKYVTEGMRKPAFLSGEQKKAIVDLLFKTNRKVTVKQLKEDYF
KKIECFDSVEISGVEDRFNASLGTYHDLLKIIKDKDFLDNEENEDILEDIVLTLTLFEDREMIEERL
KTYAHLFDDKVMKQLKRRRYTGWGRLSRKLINGIRDKQSGKTILDFLKSDGFANRNFMQLIHDD
SLTFKEDIQKAQVSGQGDSLHEHIANLAGSPAIKKGILQTVKVVDELVKVMGRHKPENIVIEMARE
NQTTQKGQKNSRERMKRIEEGIKELGSQILKEHPVENTQLQNEKLYLYYLQNGRDMYVDQELDI
NRLSDYDVDHIVPQSFLKDDSIDNKVLTRSDKNRGKSDNVPSEEVVKKMKNYWRQLLNAKLITQR
KFDNLTKAERGGLSELDKAGFIKRQLVETRQITKHVAQILDSRMNTKYDENDKLIREVKVITLKSK
LVSDFRKDFQFYKVREINNYHHAHDAYLNAVVGTALIKKYPKLESEFVYGDYKVYDVRKMIAKSE
QEIGKATAKYFFYSNIMNFFKTEITLANGEIRKRPLIETNGETGEIVWDKGRDFATVRKVLSMPQV
NIVKKTEVQTGGFSKESILPKRNSDKLIARKKDWDPKKYGGFDSPTVAYSVLVVAKVEKGKSKKLK
SVKELLGITIMERSSFEKNPIDFLEAKGYKEVKKDLIIKLPKYSLFELENGRKRMLASAGELQKGNE
LALPSKYVNFLYLASHYEKLKGSPEDNEQKQLFVEQHKHYLDEIIEQISEFSKRVILADANLDKVLS
AYNKHRDKPIREQAENIIHLFTLTNLGAPAAFKYFDTTIDRKRYTSTKEVLDATLIHQSITGLYETRI
DLSQLGGDSGGSGGSGGSTNLSDIIEKETGKQLVIQESILMLPEEVEEVIGNKPESDILVHTAY
DESTDENVMLLTSDAPEYKPWALVIQDSNGENKIKMLSGGSGGSGGSTNLSDIIEKETGKQL
VIQESILMLPEEVEEVIGNKPESDILVHTAYDESTDENVMLLTSDAPEYKPWALVIQDSNGEN
KIKMLSGGSKRTADGSEFEPKKKRKV
APOBEC3A (A3A)-BE4
(SEQ ID NO: 264)
MKRTADGSEFESPKKKRKVSEASPASGPRHLMDPHIFTSNFNNGIGRHKTYLCYEVERLDNG
TSVKMDQHRGFLHNQAKNLLCGFYGRHAELRFLDLVPSLQLDPAQIYRVTWFISWSPCFSW
GCAGEVRAFLQENTHVRLRIFAARIYDYDPLYKEALQMLRDAGAQVSIMTYDEFKHCWDT
FVDHQGCPFQPWDGLDEHSQALSGRLRAILQNQGNSGGSSGGSSGSETPGTSESATPESSGG
SSGGSDKKYSIGEAIGTNSVGWAVITDEYKVPSKKFKVEGNTDRHSIKKNEIGALLFDSGETAEATR
LKRTARRRYTRRKNRICYLQEIFSNEMAKVDDSFFHRLEESFLVEEDKKHERHPIFGNIVDEVAYH
EKYPTIYHLRKKLVDSTDKADLRLIYLALAHMIKFRGHFLIEGDLNPDNSDVDKLFIQLVQTYNQL
FEENPINASGVDAKAILSARLSKSRRLENLIAQLPGEKKNGLFGNLIALSLGLTPNFKSNFDLAEDA
KLQLSKDTYDDDLDNLLAQIGDQYADLFLAAKNLSDAILLSDILRVNTEITKAPLSASMIKRYDEHH
QDLTLLKALVRQQLPEKYKEIFFDQSKNGYAGYIDGGASQEEFYKFIKPILEKMDGTEELLVKLNR
EDLLRKQRTFDNGSIPHQIHLGELHAILRRQEDFYPFLKDNREKIEKILTFRIPYYVGPLARGNSRF
AWMTRKSEETITPWNFEEVVDKGASAQSFIERMTNFDKNLPNEKVLPKHSLLYEYFTVYNELTKV
KYVTEGMRKPAFLSGEQKKAIVDLLFKTNRKVTVKQLKEDYFKKIECFDSVEISGVEDRFNASLGT
YHDLLKIIKDKDFLDNEENEDILEDIVLTLTLFEDREMIEERLKTYAHLFDDKVMKQLKRRRYTG
WGRLSRKLINGIRDKQSGKTILDFLKSDGFANRNFMQLIHDDSLTFKEDIQKAQVSGQGDSLHEH
IANLAGSPAIKKGILQTVKVVDELVKVMGRHKPENIVIEMARENQTTQKGQKNSRERMKRIEEGIK
ELGSQILKEHPVENTQLQNEKLYLYYLQNGRDMYVDQELDINRLSDYDVDHIVPQSFLKDDSIDN
KVLTRSDKNRGKSDNVPSEEVVKKMKNYWRQLLNAKLITQRKFDNLTKAERGGLSELDKAGFIK
RQLVETRQITKHVAQILDSRMNTKYDENDKLIREVKVITLKSKLVSDFRKDFQFYKVREINNYHHA
HDAYLNAVVGTALIKKYPKLESEFVYGDYKVYDVRKMIAKSEQEIGKATAKYFFYSNIMNFFKTEIT
LANGEIRKRPLIETNGETGEIVWDKGRDFATVRKVLSMPQVNIVKKTEVQTGGFSKESILPKRNSD
KLIARKKDWDPKKYGGFDSPTVAYSVLVVAKVEKGKSKKLKSVKELLGITIMERSSFEKNPIDFLE
AKGYKEVKKDLIIKLPKYSLFELENGRKRMLASAGELQKGNELALPSKYVNFLYLASHYEKLKGSP
EDNEQKQLFVEQHKHYLDEIIEQISEFSKRVILADANLDKVLSAYNKHRDKPIREQAENIIHLFTLT
NLGAPAAFKYFDTTIDRKRYTSTKEVLDATLIHQSITGLYETRIDLSQLGGDSGGSGGSGGSYNLS
DIIEKETGKQLVIQESILMLPEEVEEVIGNKPESDILVHTAYDESTDENVMLLTSDAPEYKPWA
LVIQDSNGENKIKMLSGGSGGSGGSTNLSDIIEKETGKQLVIQESILMLPEEVEEVIGNKPESD
ILVHTAYDESTDENVMLLTSDAPEYKPWALVIQDSNGENKIKMLSGGSKRTADGSEFEPKKK
RKV
APOBEC3B (A3B)-BE4
(SEQ ID NO: 265)
MKRTADGSEFESPKKKRKVNPQIRNPMERMYRDTFYDNFENEPILYGRSYTWLCYEVKIKR
GRSNLLWDTGVFRGQVYFKPQYHAEMCFLSWFCGNQLPAYKCFQITWFVSWTPCPDCVAK
LAEFLSEHPNVTLTISAARLYYYWERDYRRALCRLSQAGARVTIMDYEEFAYCWENFVYNE
GQQFMPWYKFDENYAFLHRTLKEILRYLMDPDTFTFNFNNDPLVLRRRQTYLCYEVERLDN
GTWVLMDQHMGFLCNEAKNLLCGFYGRHAELRFLDLVPSLQLDPAQIYRVTWFISWSPCFS
WGCAGEVRAFLQENTHVRLRIFAARIYDYDPLYKEALQMLRDAGAQVSIMTYDEFEYCWD
TFVYRQGCPFQPWDGLEEHSQALSGRLRAILQNQGNSGGSSGGSSGSETPGTSESATPESSG
GSSGGSDKKYSIGLAIGTNSVGWAVITDEYKVPSKKFKVLGNTDRHSIKKNLIGALLFDSGETAEAT
RLKRTARRRYTRRKNRICYLQEIFSNEMAKVDDSFFHRLEESFLVEEDKKHERHPIFGNIVDEVAY
HEKYPTIYHLRKKLVDSTDKADLRLIYLALAHMIKFRGHFLIEGDLNPDNSDVDKLFIQLVQTYNQ
LFEENPINASGVDAKAILSARLSKSRRLENLIAQLPGEKKNGLFGNLIALSLGLTPNFKSNFLEAED
AKLQLSKDTYDDDLDNLLAQIGDQYADLFLAAKNLSDAILLSDIERVNTEITKAPESASMIKRYDEH
HQDLTLLKALVRQQLPEKYKEIFFDQSKNGYAGYIDGGASQEEFYKFIKPILEKMDGTEELLVKL
NREDLLRKQRTFDNGSIPHQIHLGELHAILRRQEDFYPFLKDNREKIEKILTFRIPYYVGPLARGNS
RFAWMTRKSEETITPWNFEEWDKGASAQSFIERMTNFDKNLPNEKVLPKHSLLYEYFTVYNELT
KVKYVTEGMRKPAFLSGEQKKAIVDLLFKTNRKVTVKQLKEDYFKKIECFDSVEISGVEDRFNASL
GTYHDLLKIIKDKDFLDNEENEDILEDIVLTLTLFEDREMIEERLKTYAHLFDDKVMKQLKRRRYT
GWGRLSRKLINGIRDKQSGKTILDFLKSDGFANRNFMQLIHDDSLTFKEDIQKAQVSGQGDSLHE
HIANLAGSPAIKKGILQTVKVVDELVKVMGRHKPENIVIEMARENQTTQKGQKNSRERMKRIEEGI
KELGSQILKEHPVENTQLQNEKLYLYYLQNGRDMYVDQELDINRLSDYDVDHIVPQSFLKDDSID
NKVLTRSDKNRGKSDNVPSEEVVKKMKNYWRQLLNAKLITQRKFDNLTKAERGGLSELDKAGFI
KRQLVETRQITKHVAQILDSRMNTKYDENDKLIREVKVITLKSKLVSDFRKDFQFYKVREINNYHH
AHDAYLNAVVGTALIKKYPKLESEFVYGDYKVYDVRKMIAKSEQEIGKATAKYFFYSNIMNFFKTEI
TLANGEIRKRPLIETNGETGEIVWDKGRDFATVRKVLSMPQVNIVKKTEVQTGGFSKESILPKRNS
DKLIARKKDWDPKKYGGFDSPTVAYSVLVVAKVEKGKSKKLKSVKELLGITIMERSSFEKNPIDFL
EAKGYKEVKKDLIIKLPKYSLFELENGRKRMLASAGELQKGNELALPSKYVNFLYLASHYEKLKGS
PEDNEQKQLFVEQHKHYLDEIIEQISEFSKRVILADANLDKVLSAYNKHRDKPIREQAENIIHLFTL
TNLGAPAAFKYFDTTIDRKRYTSTKEVLDATLIHQSITGLYETRIDLSQLGGDSGGSGGSGGSYNL
SDIIEKETGKQLVIQESILMLPEEVEEVIGNKPESDILVHTAYDESTDENVMLLTSDAPEYKPW
ALVIQDSNGENKIKMLSGGSGGSGGSTNLSDIIEKETGKQLVIQESILMLPEEVEEVIGNKPES
DILVHTAYDESTDENVMLLTSDAPEYKPWALVIQDSNGENKIKMLSGGSKRTADGSEFEPKK
KRKV
APOBEC3G (A3G)-BE4
(SEQ ID NO: 266)
MKRTADGSEFESPKKKRKVKPHFRNTVERMYRDTFSYNFYNRPILSRRNTVWLCYEVKTK
GPSRPPLDAKIFRGQVYSELKYHPEMRFFHWFSKWRKLHRDQEYEVTWYISWSPCTKCTR
DMATFLAEDPKVTLTIFVARLYYFWDPDYQEALRSLCQKRDGPRATMKIMNYDEFQHCWS
KFVYSQRELFEPWNNLPKYYILLHIMLGEILRHSMDPPTFTFNFNNEPWVRGRHETYLCYEV
ERMHNDTWVLLNQRRGFLCNQAPHKHGFLEGRHAELCFLDVIPFWKLDLDQDYRVTCFTS
WSPCFSCAQEMAKFISKNKHVSLCIFTARIYDDQGRCQEGLRTLAEAGAKISIMTYSEFKHC
WDTFVDHQGCPFQPWDGLDEHSQDLSGRLRAILQNQENSGGSSGGSSGSETPGTSESATPES
SGGSSGGSDKKYSIGLAIGTNSVGWAVITDEYKVPSKKFKVLGNTDRHSIKKNLIGALLFDSGETA
EATRLKRTARRRYTRRKNRICYLQEIFSNEMAKVDDSFFHRLEESFLVEEDKKHERHPIFGNIVDE
VAYHEKYPTIYHLRKKLVDSTDKADLRLIYLALAHMIKFRGHFLIEGDLNPDNSDVDKLFIQLVQT
YNQLFEENPINASGVDAKAILSARLSKSRRLENLIAQLPGEKKNGLFGNLIALSLGLTPNFKSNFDL
AEDAKLQLSKDTYDDDLDNLLAQIGDQYADLFLAAKNLSDAILLSDILRVNTEITKAPLSASMIKRY
DEHHQDLTLLKALVRQQLPEKYKEIFFDQSKNGYAGYIDGGASQEEFYKFIKPILEKMDGTEELL
VKLNREDLLRKQRTFDNGSIPHQIHLGELHAILRRQEDFYPFEKDNREKIEKILTFRIPYYVGPLAR
GNSRFAWMTRKSEETITPWNFEEWDKGASAQSFIERMTNFDKNLPNLKVLPKHSLLYEYFTVYN
ELTKVKYVTEGMRKPAFLSGEQKKAIVDLLFKTNRKVTVKQLKEDYFKKIECFDSVEISGVEDRF
NASLGTYHDLLKIIKDKDFLDNEENEDILEDIVLTLTLFEDREMIEERLKTYAHLFDDKVMKQLKR
RRYTGWGRLSRKLINGIRDKQSGKTILDFLKSDGFANRNFMQLIHDDSLTFKEDIQKAQVSGQGD
SLHEHIANLAGSPAIKKGILQTVKVVDELVKVMGRHKPENIVIEMARENQTTQKGQKNSRERMKR
IEEGIKELGSQILKEHPVENTQLQNEKLYLYYLQNGRDMYVDQELDINRLSDYDVDHIVPQSFLK
DDSIDNKVLTRSDKNRGKSDNVPSEEVVKKMKNYWRQLLNAKLITQRKFDNLTKAERGGESELD
KAGFIKRQLVETRQITKHVAQILDSRMNTKYDENDKLIREVKVITLKSKLVSDFRKDFQFYKVREIN
NYHHAHDAYLNAVVGTALIKKYPKLESEFVYGDYKVYDVRKMIAKSEQEIGKATAKYFFYSNIMNF
FKTEITLANGEIRKRPLIETNGETGEIVWDKGRDFATVRKVESMPQVNIVKKTEVQTGGFSKESILP
KRNSDKLIARKKDWDPKKYGGFDSPTVAYSVLVVAKVEKGKSKKEKSVKELLGITIMERSSFEKNP
IDFLEAKGYKEVKKDLIIKLPKYSLFELENGRKRMLASAGELQKGNELALPSKYVNFLYLASHYEK
LKGSPEDNEQKQLFVEQHKHYLDEIIEQISEFSKRVILADANLDKVLSAYNKHRDKPIREQAENIIH
LFTLTNLGAPAAFKYFDTTIDRKRYTSTKEVLDATLIHQSITGLYETRIDLSQLGGDSGGSGGSGGS
TNLSDIIEKETGKQLVIQESILMLPEEVEEVIGNKPESDILVHTAYDESTDENVMLLTSDAPEY
KPWALVIQDSNGENKIKMLSGGSGGSGGSTNLSDIIEKETGKQLVIQESILMLPEEVEEVIGN
KPESDILVHTAYDESTDENVMLLTSDAPEYKPWALVIQDSNGENKIKMLSGGSKRTADGSEF
EPKKKRKV
AID-BE4
(SEQ ID NO: 267)
MKRTADGSEFESPKKKRKVDSLLMNRRKFLYQFKNVRWAKGRRETYLCYVVKRRDSATSF
SLDFGYLRNKNGCHVELLFLRYISDWDLDPGRCYRVTWFTSWSPCYDCARHVADFLRGNP
NLSLRIFTARLYFCEDRKAEPEGLRRLHRAGVQIAIMTFKDYFYCWNTFVENHERTFKAWE
GLHENSVRLSRQLRRILLPLYEVDDLRDAFRTLGLSGGSSGGSSGSETPGTSESATPESSGGSS
GGSDKKYSIGLAIGTNSVGWAVITDEYKVPSKKFKVLGNTDRHSIKKNLIGALLFDSGETAEATRLK
RTARRRYTRRKNRICYEQEIFSNEMAKVDDSFFHRLEESFLVEEDKKHERHPIFGNIVDEVAYHEK
YPTIYHLRKKLVDSTDKADLRLIYLALAHMIKFRGHFLIEGDLNPDNSDVDKLFIQLVQTYNQLFE
ENPINASGVDAKAILSARLSKSRRLENLIAQEPGEKKNGLFGNLIALSLGLTPNFKSNFDLAEDAKL
QLSKDTYDDDLDNLLAQIGDQYADLFLAAKNLSDAILLSDILRVNTEITKAPLSASMIKRYDEHHQ
DLTLLKALVRQQLPEKYKEIFFDQSKNGYAGYIDGGASQEEFYKFIKPIELKMDGTEELLVKLNRE
DLLRKQRTFDNGSIPHQIHLGELHAILRRQEDFYPFLKDNREKIEKILTFRIPYYVGPLARGNSRFA
WMTRKSEETITPWNFEEVVDKGASAQSFIERMTNFDKNLPNEKVLPKHSLLYEYFTVYNELTKVK
YVTEGMRKPAFLSGEQKKAIVDLLFKTNRKVTVKQLKEDYFKKIECFDSVEISGVEDRFNASLGTY
HDLLKIIKDKDFLDNEENEDILEDIVLTLTLFEDREMIEERLKTYAHLFDDKVMKQLKRRRYTGW
GRLSRKLINGIRDKQSGKTILDFLKSDGFANRNFMQLIHDDSLTFKEDIQKAQVSGQGDSLHEHI
ANLAGSPAIKKGILQTVKVVDELVKVMGRHKPENIVIEMARENQTTQKGQKNSRERMKRIEEGIK
ELGSQILKEHPVENTQLQNEKLYLYYLQNGRDMYVDQELDINRLSDYDVDHIVPQSFLKDDSIDN
KVLTRSDKNRGKSDNVPSEEVVKKMKNYWRQLLNAKLITQRKFDNLTKAERGGLSELDKAGFIK
RQLVETRQITKHVAQILDSRMNTKYDENDKLIREVKVITLKSKLVSDFRKDFQFYKVREINNYHHA
HDAYLNAVVGTALIKKYPKLESEFVYGDYKVYDVRKMIAKSEQEIGKATAKYFFYSNIMNFFKTEIT
LANGEIRKRPLIETNGETGEIVWDKGRDFATVRKVLSMPQVNIVKKTEVQTGGFSKESILPKRNSD
KLIARKKDWDPKKYGGFDSPTVAYSVLVVAKVEKGKSKKLKSVKELLGITIMERSSFEKNPIDFEL
AKGYKEVKKDLIIKLPKYSEFELENGRKRMLASAGELQKGNELALPSKYVNFLYLASHYEKLKGSP
EDNEQKQLFVEQHKHYLDEIIEQISEFSKRVILADANLDKVLSAYNKHRDKPIREQAENIIHLFTLT
NLGAPAAFKYFDTTIDRKRYTSTKEVLDATLIHQSITGLYETRIDLSQLGGDSGGSGGSGGSYNLS
DIIEKETGKQLVIQESILMLPEEVEEVIGNKPESDILVHTAYDESTDENVMLLTSDAPEYKPWA
LVIQDSNGENKIKMLSGGSGGSGGSTNLSDIIEKETGKQLVIQESILMLPEEVEEVIGNKPESD
ILVHTAYDESTDENVMLLTSDAPEYKPWALVIQDSNGENKIKMLSGGSKRTADGSEFEPKKK
RKV
CDA-BE4
(SEQ ID NO: 268)
MKRTADGSEFESPKKKRKVTDAEYVRIHEKLDIYTFKKQFFNNKKSVSHRCYVLFELKRRG
ERRACFWGYAVNKPQSGTERGIHAEIFSIRKVEEYLRDNPGQFTINWYSSWSPCADCAEKIL
EWYNQELRGNGHTLKIWACKLYYEKNARNQIGLWNLRDNGVGLNVMVSEHYQCCRKIFIQ
SSHNQLNENRWLEKTLKRAEKRRSELSIMIQVKILHTTKSPAVSGGSSGGSSGSETPGTSESA
TPESSGGSSGGSDKKYSIGLAIGTNSVGWAVITDEYKVPSKKFKVLGNTDRHSIKKNLIGALLFDS
GETAEATRLKRTARRRYTRRKNRICYLQEIFSNEMAKVDDSFFHRLEESFLVEEDKKHERHPIFGN
IVDEVAYHEKYPTIYHLRKKLVDSTDKADLRLIYLALAHMIKFRGHFLIEGDLNPDNSDVDKLFIQL
VQTYNQLFEENPINASGVDAKAILSARLSKSRRLENLIAQLPGEKKNGLFGNLIAESLGLTPNFKSN
FDLAEDAKLQLSKDTYDDDLDNLLAQIGDQYADLFLAAKNLSDAILLSDILRVNTEITKAPLSASMI
KRYDEHHQDLTLLKALVRQQLPEKYKEIFFDQSKNGYAGYIDGGASQEEFYKFIKPILEKMDGTE
ELLVKLNREDLLRKQRTFDNGSIPHQIHLGELHAILRRQEDFYPFEKDNRLKIEKILTFRIPYYVGP
LARGNSRFAWMTRKSEETITPWNFEEVVDKGASAQSFIERMTNFDKNLPNEKVLPKHSLLYEYFT
VYNELTKVKYVTEGMRKPAFLSGEQKKAIVDLLFKTNRKVTVKQLKEDYFKKIECFDSVEISGVED
RFNASLGTYHDLLKIIKDKDFLDNEENEDILEDIVLTLTLFEDREMIEERLKTYAHLFDDKVMKQL
KRRRYTGWGRLSRKLINGIRDKQSGKTILDFLKSDGFANRNFMQLIHDDSLTFKEDIQKAQVSGQ
GDSLHEHIANLAGSPAIKKGILQTVKVVDELVKVMGRHKPENIVIEMARENQTTQKGQKNSRERM
KRIEEGIKELGSQILKEHPVENTQLQNEKLYLYYLQNGRDMYVDQELDINRLSDYDVDHIVPQSFL
KDDSIDNKVLTRSDKNRGKSDNVPSEEVVKKMKNYWRQLLNAKLITQRKFDNLTKAERGGLSEL
DKAGFIKRQLVETRQITKHVAQILDSRMNTKYDENDKLIREVKVITLKSKLVSDFRKDFQFYKVRE
INNYHHAHDAYLNAVVGTALIKKYPKLESEFVYGDYKVYDVRKMIAKSEQEIGKATAKYFFYSNIM
NFFKTEITLANGEIRKRPLIETNGETGEIVWDKGRDFATVRKVLSMPQVNIVKKTEVQTGGFSKESI
LPKRNSDKLIARKKDWDPKKYGGFDSPTVAYSVLVVAKVEKGKSKKLKSVKELLGITIMERSSFEK
NPIDLEEAKGYKEVKKDLIIKEPKYSEFELENGRKRMLASAGELQKGNELALPSKYVNFLYLASHY
EKLKGSPEDNEQKQLFVEQHKHYLDEIIEQISEFSKRVILADANLDKVLSAYNKHRDKPIREQAEN
IIHLFTLTNLGAPAAFKYFDTTIDRKRYTSTKEVLDATLIHQSITGLYETRIDLSQLGGDSGGSGGSG
GSTNLSDIIEKETGKQLVIQESILMLPEEVEEVIGNKPESDILVHTAYDESTDENVMLLTSDAP
EYKPWALVIQDSNGENKIKMLSGGSGGSGGSTNLSDIIEKETGKQLVIQESILMLPEEVEEVIG
NKPESDILVHTAYDESTDENVMLLTSDAPEYKPWALVIQDSNGENKIKMLSGGSKRTADGSE
FEPKKKRKV
FERNY-BE4
(SEQ ID NO: 269)
MKRTADGSEFESPKKKRKVFERNYDPRELRKETYLLYEIKWGKSGKLWRHWCQNNRTQHA
EVYFLENIFNARRFNPSTHCSITWYLSWSPCAECSQKIVDFLKEHPNVNLEIYVARLYYHEDE
RNRQGLRDLVNSGVTIRIMDLPDYNYCWKTFVSDQGGDEDYWPGHFAPWIKQYSLKLSGG
SSGGSSGSEYPGYSESAYPESSGGSSGGSDKKYSIGLAIGTNSVGWAVITDEYKVPSKKFKVLGNT
DRHSIKKNLIGALLFDSGETAEATRLKRTARRRYTRRKNRICYLQEIFSNEMAKVDDSFFHRLEESF
LVEEDKKHERHPIFGNIVDEVAYHEKYPTIYHLRKKLVDSTDKADLRLIYLALAHMIKFRGHFLIE
GDLNPDNSDVDKLFIQLVQTYNQLFEENPINASGVDAKAILSARLSKSRRLENLIAQLPGEKKNGL
FGNLIALSLGLTPNFKSNFDLAEDAKLQLSKDTYDDDLDNLLAQIGDQYADLFLAAKNLSDAILLS
DILRVNTEITKAPLSASMIKRYDEHHQDLTLLKALVRQQLPEKYKEIFFDQSKNGYAGYIDGGASQ
EEFYKFIKPILEKMDGTEELLVKLNREDLLRKQRTFDNGSIPHQIHLGELHAILRRQEDFYPFLKD
NREKIEKILTFRIPYYVGPLARGNSRFAWMTRKSEETITPWNFEEVVDKGASAQSFIERMTNFDKN
LPNEKVLPKHSLLYEYFTVYNELTKVKYVTEGMRKPAFLSGEQKKAIVDLLFKTNRKVTVKQLKE
DYFKKIECFDSVEISGVEDRFNASLGTYHDLLKIIKDKDFLDNEENEDILEDIVLTLTLFEDREMIE
ERLKTYAHLFDDKVMKQLKRRRYTGWGRLSRKLINGIRDKQSGKTILDFLKSDGFANRNFMQLIH
DDSLTFKEDIQKAQVSGQGDSLHEHIANLAGSPAIKKGILQTVKVVDELVKVMGRHKPENIVIEM
ARENQTTQKGQKNSRERMKRIEEGIKELGSQILKEHPVENTQLQNEKLYLYYLQNGRDMYVDQE
LDINRLSDYDVDHIVPQSFLKDDSIDNKVLTRSDKNRGKSDNVPSEEVVKKMKNYWRQLLNAKLI
TQRKFDNLTKAERGGLSELDKAGFIKRQLVETRQITKHVAQILDSRMNTKYDENDKLIREVKVITL
KSKLVSDFRKDFQFYKVREINNYHHAHDAYLNAVVGTALIKKYPKLESEFVYGDYKVYDVRKMIA
KSEQEIGKATAKYFFYSNIMNFFKTEITLANGEIRKRPLIETNGETGEIVWDKGRDFATVRKVLSMP
QVNIVKKTEVQTGGFSKESILPKRNSDKLIARKKDWDPKKYGGFDSPTVAYSVLVVAKVEKGKSK
KLKSVKELLGITIMERSSFEKNPIDFLEAKGYKEVKKDLIIKLPKYSLFELENGRKRMLASAGELQK
GNELALPSKYVNFLYLASHYEKLKGSPEDNEQKQLFVEQHKHYLDEIIEQISEFSKRVILADANLD
KVLSAYNKHRDKPIREQAENIIHLFTLTNLGAPAAFKYFDTTIDRKRYTSTKEVLDATLIHQSITGLY
ETRIDLSQLGGDSGGSGGSGGSTNLSDIIEKETGKQLVIQESILMLPEEVEEVIGNKPESDILVH
TAYDESTDENVMLLTSDAPEYKPWALVIQDSNGENKIKMLSGGSGGSGGSTNLSDIIEKETG
KQLVIQESILMLPEEVEEVIGNKPESDILVHTAYDESTDENVMLLTSDAPEYKPWALVIQDSN
GENKIKMLSGGSKRTADGSEFEPKKKRKV
evolved APOBEC3A (eA3A)-BE4
(SEQ ID NO: 270)
MKRTADGSEFESPKKKRKVEASPASGPRHLMDPHIFTSNFNNGIGRHKTYLCYEVERLDNG
TSVKMDQHRGFLHGQAKNLLCGFYGRHAELRFLDLVPSLQLDPAQIYRVTWFISWSPCFSW
GCAGEVRAFLQENTHVRLRIFAARIYDYDPLYKEALQMLRDAGAQVSIMTYDEFKHCWDT
FVDHQGCPFQPWDGLDEHSQALSGRLRAILQNQGNSGGSSGGSSGSETPGTSESATPESSGG
SSGGSDKKYSIGLAIGTNSVGWAVITDEYKVPSKKFKVLGNTDRHSIKKNLIGALLFDSGETAEATR
LKRTARRRYTRRKNRICYLQEIFSNEMAKVDDSFFHRLEESFLVEEDKKHERHPIFGNIVDEVAYH
EKYPTIYHLRKKLVDSTDKADLRLIYLALAHMIKFRGHFLIEGDLNPDNSDVDKLFIQLVQTYNQL
FEENPINASGVDAKAILSARLSKSRRLENLIAQLPGEKKNGLFGNLIALSLGLTPNFKSNFDLAEDA
KLQLSKDTYDDDLDNLLAQIGDQYADLFLAAKNLSDAILLSDILRVNTEITKAPLSASMIKRYDEHH
QDLTLLKALVRQQLPEKYKEIFFDQSKNGYAGYIDGGASQEEFYKFIKPILEKMDGTEELLVKLNR
EDLLRKQRTFDNGSIPHQIHLGELHAILRRQEDFYPFLKDNREKIEKILTFRIPYYVGPLARGNSRF
AWMTRKSEETITPWNFEEVVDKGASAQSFIERMTNFDKNLPNEKVLPKHSLLYEYFTVYNELTKV
KYVTEGMRKPAFLSGEQKKAIVDLLFKTNRKVTVKQLKEDYFKKIECFDSVEISGVEDRFNASLGT
YHDLLKIIKDKDFLDNEENEDILEDIVLTLTLFEDREMIEERLKTYAHLFDDKVMKQLKRRRYTG
WGRLSRKLINGIRDKQSGKTILDFLKSDGFANRNFMQLIHDDSLTFKEDIQKAQVSGQGDSLHEH
IANLAGSPAIKKGILQTVKVVDELVKVMGRHKPENIVIEMARENQTTQKGQKNSRERMKRIEEGIK
ELGSQILKEHPVENTQLQNEKLYLYYLQNGRDMYVDQELDINRLSDYDVDHIVPQSFLKDDSIDN
KVLTRSDKNRGKSDNVPSEEVVKKMKNYWRQLLNAKLITQRKFDNLTKAERGGLSELDKAGFIK
RQLVETRQITKHVAQILDSRMNTKYDENDKLIREVKVITLKSKLVSDFRKDFQFYKVREINNYHHA
HDAYLNAVVGTALIKKYPKLESEFVYGDYKVYDVRKMIAKSEQEIGKATAKYFFYSNIMNFFKTEIT
LANGEIRKRPLIETNGETGEIVWDKGRDFATVRKVLSMPQVNIVKKTEVQTGGFSKESILPKRNSD
KLIARKKDWDPKKYGGFDSPTVAYSVLVVAKVEKGKSKKLKSVKELLGITIMERSSFEKNPIDFLE
AKGYKEVKKDLIIKEPKYSLFELENGRKRMLASAGELQKGNELALPSKYVNFLYLASHYEKLKGSP
EDNEQKQLFVEQHKHYLDEIIEQISEFSKRVILADANLDKVLSAYNKHRDKPIREQAENIIHLFTLT
NLGAPAAFKYFDTTIDRKRYTSTKEVLDATLIHOSITGLYETRIDLSQLGGDSGGSGGSGGSTNLS
DIIEKETGKQLVIQESILMLPEEVEEVIGNKPESDILVHTAYDESTDENVMLLTSDAPEYKPWA
LVIQDSNGENKIKMLSGGSGGSGGSTNLSDIIEKETGKQLVIQESILMLPEEVEEVIGNKPESD
ILVHTAYDESTDENVMLLTSDAPEYKPWALVIQDSNGENKIKMLSGGSKRTADGSEFEPKKK
RKV
AALN-BE4
(SEQ ID NO: 271)
MKRTADGSEFESPKKKRKVSSETGPVAVDPTLRRRIEPHEFEVFFDPRELAAETCLLYEINWG
GRHSIWRHTSQNTNKHVEVNFIEKFTTERYFCPNTRCSITWFLSWSPCGECSRAITEFLSRYP
HVTLFIYIARLYHLANPRNRQGLRDLISSGVTIQIMTEQESGYCWRNFVNYSPSNEAHWPRY
PHLWVRLYVLELYCIILGLPPCLNILRRKQPQLTFFTIALQSCHYQRLPPHILWATGLKSGGSS
GGSSGSEYPGYSESAYPESSGGSSGGSDKKYSIGLAIGTNSVGWAVITDEYKVPSKKFKVLGNTDR
HSIKKNLIGALLFDSGETAEATRLKRTARRRYTRRKNRICYLQEIFSNEMAKVDDSFFHRLEESFLV
EEDKKHERHPIFGNIVDEVAYHEKYPTIYHLRKKLVDSTDKADLRLIYLALAHMIKFRGHFLIEGD
LNPDNSDVDKLFIQLVQTYNQLFEENPINASGVDAKAILSARLSKSRRLENLIAQLPGEKKNGLFG
NLIALSLGLTPNFKSNFDLAEDAKLQLSKDTYDDDLDNLLAQIGDQYADLFLAAKNLSDAILLSDIL
RVNTEITKAPLSASMIKRYDEHHQDLTLLKALVRQQLPEKYKEIFFDQSKNGYAGYIDGGASQEEF
YKFIKPILEKMDGTEELLVKLNREDLLRKQRTFDNGSIPHQIHLGELHAILRRQEDFYPFLKDNRE
KIEKILTFRIPYYVGPLARGNSRFAWMTRKSEETITPWNFEEVVDKGASAQSFIERMTNFDKNLPN
EKVLPKHSLLYEYFTVYNELTKVKYVTEGMRKPAFLSGEQKKAIVDLLFKTNRKVTVKQLKEDYF
KKIECFDSVEISGVEDRFNASLGTYHDLLKIIKDKDFLDNEENEDILEDIVLTLTLFEDREMIEERL
KTYAHLFDDKVMKQLKRRRYTGWGRLSRKLINGIRDKQSGKTILDFLKSDGFANRNFMQLIHDD
SLTFKEDIQKAQVSGQGDSLHEHIANLAGSPAIKKGILQTVKVVDELVKVMGRHKPENIVIEMARE
NQTTQKGQKNSRERMKRIEEGIKELGSQILKEHPVENTQLQNEKLYLYYLQNGRDMYVDQELDI
NRLSDYDVDHIVPQSFLKDDSIDNKVLTRSDKNRGKSDNVPSEEVVKKMKNYWRQLLNAKLITQR
KFDNLTKAERGGLSELDKAGFIKRQLVETRQITKHVAQILDSRMNTKYDENDKLIREVKVITLKSK
LVSDFRKDFQFYKVREINNYHHAHDAYLNAVVGTALIKKYPKLESEFVYGDYKVYDVRKMIAKSE
QEIGKATAKYFFYSNIMNFFKTEITLANGEIRKRPLIETNGETGEIVWDKGRDFATVRKVLSMPQV
NIVKKTEVQTGGFSKESILPKRNSDKLIARKKDWDPKKYGGFDSPTVAYSVLVVAKVEKGKSKKLK
SVKELLGITIMERSSFEKNPIDFLEAKGYKEVKKDLIIKLPKYSLFELENGRKRMLASAGELQKGNE
LALPSKYVNFLYLASHYEKLKGSPEDNLQKQLFVEQHKHYLDEIIEQISEFSKRVILADANLDKVLS
AYNKHRDKPIREQAENIIHEFTLTNLGAPAAFKYFDTTIDRKRYTSTKEVLDATLIHQSITGLYETRI
DLSQLGGDSGGSGGSGGSTNLSDIIEKETGKQLVIQESILMLPEEVEEVIGNKPESDILVHTAY
DESTDENVMLLTSDAPEYKPWALVIQDSNGENKIKMLSGGSGGSGGSTNLSDIIEKETGKQL
VIQESILMLPEEVEEVIGNKPESDILVHTAYDESTDENVMLLTSDAPEYKPWALVIQDSNGEN
KIKMLSGGSKRTADGSEFEPKKKRKV
BE4max, modified with SpCas9-NG
(SEQ ID NO: 272)
MKRTADGSEFESPKKKRKVSSETGPVAVDPTLRRRIEPHEFEVFFDPRELRKETCLLYEINWG
GRHSIWRHTSQNTNKHVEVNFIEKFTTERYFCPNTRCSITWFLSWSPCGECSRAITEFLSRYP
HVTLFIYIARLYHHADPRNRQGLRDLISSGVTIQIMTEQESGYCWRNFVNYSPSNEAHWPRY
PHLWVRLYVLELYCIILGLPPCLNILRRKQPQLTFFTIALQSCHYQRLPPHILWATGLKSGGSS
GGSSGSEYPGYSESAYPESSGGSSGGSDKKYSIGLAIGTNSVGWAVITDEYKVPSKKFKVLGNTDR
HSIKKNLIGALLFDSGETAEATRLKRTARRRYTRRKNRICYLQEIFSNEMAKVDDSFFHRLEESFLV
EEDKKHERHPIFGNIVDEVAYHEKYPTIYHLRKKLVDSTDKADLRLIYLALAHMIKFRGHFLIEGD
LNPDNSDVDKLFIQLVQTYNQLFEENPINASGVDAKAILSARLSKSRRLENLIAQLPGEKKNGLFG
NLIALSLGLTPNFKSNFDLAEDAKLQLSKDTYDDDLDNLLAQIGDQYADLFLAAKNLSDAILLSDIL
RVNTEITKAPLSASMIKRYDEHHQDLTLLKALVRQQLPEKYKEIFFDQSKNGYAGYIDGGASQEEF
YKFIKPILEKMDGTEELLVKLNREDLLRKQRTFDNGSIPHQIHLGELHAILRRQEDFYPFLKDNRE
KIEKILTFRIPYYVGPLARGNSRFAWMTRKSEETITPWNFEEVVDKGASAQSFIERMTNFDKNLPN
EKVLPKHSLLYEYFTVYNELTKVKYVTEGMRKPAFLSGEQKKAIVDLLFKTNRKVTVKQLKEDYF
KKIECFDSVEISGVEDRFNASLGTYHDLLKIIKDKDFLDNEENEDILEDIVLTLTLFEDREMIEERL
KTYAHLFDDKVMKQLKRRRYTGWGRLSRKLINGIRDKQSGKTILDFLKSDGFANRNFMQLIHDD
SLTFKEDIQKAQVSGQGDSLHEHIANLAGSPAIKKGILQTVKVVDELVKVMGRHKPENIVIEMARE
NQTTQKGQKNSRERMKRIEEGIKELGSQILKEHPVENTQLQNEKLYLYYLQNGRDMYVDQELDI
NRLSDYDVDHIVPQSFLKDDSIDNKVLTRSDKNRGKSDNVPSEEVVKKMKNYWRQLLNAKLITQR
KFDNLTKAERGGLSELDKAGFIKRQLVETRQITKHVAQILDSRMNTKYDENDKLIREVKVITLKSK
LVSDFRKDFQFYKVREINNYHHAHDAYLNAVVGTALIKKYPKLESEFVYGDYKVYDVRKMIAKSE
QEIGKATAKYFFYSNIMNFFKTEITLANGEIRKRPLIETNGETGEIVWDKGRDFATVRKVLSMPQV
NIVKKTEVQTGGFSKESIRPKRNSDKLIARKKDWDPKKYGGFVSPTVAYSVLVVAKVEKGKSKKLK
SVKELLGITIMERSSFEKNPIDFLEAKGYKEVKKDLIIKLPKYSLFELENGRKRMLASARFLQKGNE
LALPSKYVNFLYLASHYEKLKGSPEDNEQKQLFVEQHKHYLDEIIEQISEFSKRVILADANLDKVLS
AYNKHRDKPIREQAENIIHLFTLTNLGAPRAFKYFDTTIDRKVYRSTKEVLDATLIHQSITGLYETRI
DLSQLGGDSGGSGGSGGSTNLSDIIEKETGKQLVIQESILMLPEEVEEVIGNKPESDILVHTAY
DESTDENVMLLTSDAPEYKPWALVIQDSNGENKIKMLSGGSGGSGGSTNLSDIIEKETGKQL
VIQESILMLPEEVEEVIGNKPESDILVHTAYDESTDENVMLLTSDAPEYKPWALVIQDSNGEN
KIKMLSGGSKRTADGSEFEPKKKRKV
YE1-SpCas9-NG base editor (YE1-NG)
(SEQ ID NO: 273)
MKRTADGSEFESPKKKRKVSSETGPVAVDPTLRRRIEPHEFEVFFDPRELRKETCLLYEINWG
GRHSIWRHTSQNTNKHVEVNFIEKFTTERYFCPNTRCSITWFLSYSPCGECSRAITEFLSRYP
HVTLFIYIARLYHHADPENRQGLRDLISSGVTIQIMTEQESGYCWRNFVNYSPSNEAHWPRY
PHLWVRLYVLELYCIILGLPPCLNILRRKQPQLTFFTIALQSCHYQRLPPHILWATGLKSGGSS
GGSSGSETPGTSESATPESSGGSSGGSDKKYSIGLAIGTNSVGWAVITDEYKVPSKKFKVLGNTDR
HSIKKNLIGALLFDSGETAEATRLKRTARRRYTRRKNRICYLQEIFSNEMAKVDDSFFHRLEESFLV
EEDKKHERHPIFGNIVDEVAYHEKYPTIYHLRKKLVDSTDKADLRLIYLALAHMIKFRGHFLIEGD
LNPDNSDVDKLFIQLVQTYNQLFEENPINASGVDAKAILSARLSKSRRLENLIAQLPGEKKNGLFG
NLIALSLGLTPNFKSNFDLAEDAKLQLSKDTYDDDLDNLLAQIGDQYADLFLAAKNLSDAILLSDIL
RVNTEITKAPLSASMIKRYDEHHQDLTLLKALVRQQLPEKYKEIFFDQSKNGYAGYIDGGASQEEF
YKFIKPILEKMDGTEELLVKLNREDLLRKQRTFDNGSIPHQIHLGELHAILRRQEDFYPFLKDNRE
KIEKILTFRIPYYVGPLARGNSRFAWMTRKSEETITPWNFEEVVDKGASAQSFIERMTNFDKNLPN
EKVLPKHSLLYEYFTVYNELTKVKYVTEGMRKPAFLSGEQKKAIVDLLFKTNRKVTVKQLKEDYF
KKIECFDSVEISGVEDRFNASLGTYHDLLKIIKDKDFLDNEENEDILEDIVLTLTLFEDREMIEERL
KTYAHLFDDKVMKQLKRRRYTGWGRLSRKLINGIRDKQSGKTILDFLKSDGFANRNFMQLIHDD
SLTFKEDIQKAQVSGQGDSLHEHIANLAGSPAIKKGILQTVKVVDELVKVMGRHKPENIVIEMARE
NQTTQKGQKNSRERMKRIEEGIKELGSQILKEHPVENTQLQNEKLYLYYLQNGRDMYVDQELDI
NRLSDYDVDHIVPQSFLKDDSIDNKVLTRSDKNRGKSDNVPSEEVVKKMKNYWRQLLNAKLITQR
KFDNLTKAERGGLSELDKAGFIKRQLVETRQITKHVAQILDSRMNTKYDENDKLIREVKVITLKSK
LVSDFRKDFQFYKVREINNYHHAHDAYLNAVVGTALIKKYPKLESEFVYGDYKVYDVRKMIAKSE
QEIGKATAKYFFYSNIMNFFKTEITLANGEIRKRPLIETNGETGEIVWDKGRDFATVRKVLSMPQV
NIVKKTEVQTGGFSKESIRPKRNSDKLIARKKDWDPKKYGGFVSPTVAYSVLVVAKVEKGKSKKLK
SVKELLGITIMERSSFEKNPIDFLEAKGYKEVKKDLIIKLPKYSLFELENGRKRMLASARFLQKGNE
LALPSKYVNFLYLASHYEKLKGSPEDNEQKQLFVEQHKHYLDEIIEQISEFSKRVILADANLDKVLS
AYNKHRDKPIREQAENIIHLFTLTNLGAPRAFKYFDTTIDRKVYRSTKEVLDATLIHQSITGLYETRI
DLSQLGGDSGGSGGSGGSTNLSDIIEKETGKQLVIQESILMLPEEVEEVIGNKPESDILVHTAY
DESTDENVMLLTSDAPEYKPWALVIQDSNGENKIKMLSGGSGGSGGSTNLSDIIEKETGKQL
VIQESILMLPEEVEEVIGNKPESDILVHTAYDESTDENVMLLTSDAPEYKPWALVIQDSNGEN
KIKMLSGGSKRTADGSEFEPKKKRKV
YE2-SpCas9-NG base editor
(SEQ ID NO: 274)
MKRTADGSEFESPKKKRKVSSETGPVAVDPTLRRRIEPHEFEVFFDPRELRKETCLLYEINWG
GRHSIWRHTSQNTNKHVEVNFIEKFTTERYFCPNTRCSITWFLSYSPCGECSRAITEFLSRYP
HVTLFIYIARLYHHADPRNRQGLEDLISSGVTIQIMTEQESGYCWRNFVNYSPSNEAHWPRY
PHLWVRLYVLELYCIILGLPPCLNILRRKQPQLTFFTIALQSCHYQRLPPHILWATGLKSGGSS
GGSSGSETPGTSESATPESSGGSSGGSDKKYSIGLAIGTNSVGWAVITDEYKVPSKKFKVLGNTDR
HSIKKNLIGALLFDSGETAEATRLKRTARRRYTRRKNRICYLQEIFSNEMAKVDDSFFHRLEESFLV
EEDKKHERHPIFGNIVDEVAYHEKYPTIYHLRKKLVDSTDKADLRLIYLALAHMIKFRGHFLIEGD
LNPDNSDVDKLFIQLVQTYNQLFEENPINASGVDAKAILSARLSKSRRLENLIAQLPGEKKNGLFG
NLIALSLGLTPNFKSNFDLAEDAKLQLSKDTYDDDLDNLLAQIGDQYADLFLAAKNLSDAILLSDIL
RVNTEITKAPLSASMIKRYDEHHQDLTLLKALVRQQLPEKYKEIFFDQSKNGYAGYIDGGASQEEF
YKFIKPILEKMDGTEELLVKLNREDLLRKQRTFDNGSIPHQIHLGELHAILRRQEDFYPFLKDNRE
KIEKILTFRIPYYVGPLARGNSRFAWMTRKSEETITPWNFEEVVDKGASAQSFIERMTNFDKNLPN
EKVLPKHSLLYEYFTVYNELTKVKYVTEGMRKPAFLSGEQKKAIVDLLFKTNRKVTVKQLKEDYF
KKIECFDSVEISGVEDRFNASLGTYHDLLKIIKDKDFLDNEENEDILEDIVLTLTLFEDREMIEERL
KTYAHLFDDKVMKQLKRRRYTGWGRLSRKLINGIRDKQSGKTILDFLKSDGFANRNFMQLIHDD
SLTFKEDIQKAQVSGQGDSLHEHIANLAGSPAIKKGILQTVKVVDELVKVMGRHKPENIVIEMARE
NQTTQKGQKNSRERMKRIEEGIKELGSQILKEHPVENTQLQNEKLYLYYLQNGRDMYVDQELDI
NRLSDYDVDHIVPQSFLKDDSIDNKVLTRSDKNRGKSDNVPSEEVVKKMKNYWRQLLNAKLITQR
KFDNLTKAERGGLSELDKAGFIKRQLVETRQITKHVAQILDSRMNTKYDENDKLIREVKVITLKSK
LVSDFRKDFQFYKVREINNYHHAHDAYLNAVVGTALIKKYPKLESEFVYGDYKVYDVRKMIAKSE
QEIGKATAKYFFYSNIMNFFKTEITLANGEIRKRPLIETNGETGEIVWDKGRDFATVRKVLSMPQV
NIVKKTEVQTGGFSKESIRPKRNSDKLIARKKDWDPKKYGGFVSPTVAYSVLVVAKVEKGKSKKLK
SVKELLGITIMERSSFEKNPIDFLEAKGYKEVKKDLIIKLPKYSLFELENGRKRMLASARFLQKGNE
LALPSKYVNFLYLASHYEKLKGSPEDNEQKQLFVEQHKHYLDEIIEQISEFSKRVILADANLDKVLS
AYNKHRDKPIREQAENIIHLFTLTNLGAPRAFKYFDTTIDRKVYRSTKEVLDATLIHQSITGLYETRI
DLSQLGGDSGGSGGSGGSTNLSDIIEKETGKQLVIQESILMLPEEVEEVIGNKPESDILVHTAY
DESTDENVMLLTSDAPEYKPWALVIQDSNGENKIKMLSGGSGGSGGSTNLSDIIEKETGKQL
VIQESILMLPEEVEEVIGNKPESDILVHTAYDESTDENVMLLTSDAPEYKPWALVIQDSNGEN
KIKMLSGGSKRTADGSEFEPKKKRKV
YEE-SpCas9-NG base editor
(SEQ ID NO: 275)
MKRTADGSEFESPKKKRKVSSETGPVAVDPTLRRRIEPHEFEVFFDPRELRKETCLLYEINWG
GRHSIWRHTSQNTNKHVEVNFIEKFTTERYFCPNTRCSITWFLSYSPCGECSRAITEFLSRYP
HVTLFIYIARLYHHADPENRQGLEDLISSGVTIQIMTEQESGYCWRNFVNYSPSNEAHWPRY
PHLWVRLYVLELYCIILGLPPCLNILRRKQPQLTFFTIALQSCHYQRLPPHILWATGLKSGGSS
GGSSGSEEPGESESAEPESSGGSSGGSDKKYSIGLAIGTNSVGWAVITDEYKVPSKKFKVLGNTDR
HSIKKNLIGALLFDSGETAEATRLKRTARRRYTRRKNRICYLQEIFSNEMAKVDDSFFHRLEESFLV
EEDKKHERHPIFGNIVDEVAYHEKYPTIYHLRKKLVDSTDKADLRLIYLALAHMIKFRGHFLIEGD
LNPDNSDVDKLFIQLVQTYNQLFEENPINASGVDAKAILSARLSKSRRLENLIAQLPGEKKNGLFG
NLIALSLGLTPNFKSNFDLAEDAKLQLSKDTYDDDLDNLLAQIGDQYADLFLAAKNLSDAILLSDIL
RVNTEITKAPLSASMIKRYDEHHQDLTLLKALVRQQLPEKYKEIFFDQSKNGYAGYIDGGASQEEF
YKFIKPILEKMDGTEELLVKLNREDLLRKQRTFDNGSIPHQIHLGELHAILRRQEDFYPLEKDNRE
KIEKILTFRIPYYVGPLARGNSRFAWMTRKSEETITPWNFEEVVDKGASAQSFIERMTNFDKNLPN
EKVLPKHSLLYEYFTVYNELTKVKYVTEGMRKPAFLSGEQKKAIVDLLFKTNRKVTVKQLKEDYF
KKIECFDSVEISGVEDRFNASLGTYHDLLKIIKDKDFLDNEENEDILEDIVLTLTLFEDREMIEERL
KTYAHLFDDKVMKQLKRRRYTGWGRLSRKLINGIRDKQSGKTILDFLKSDGFANRNFMQLIHDD
SLTFKEDIQKAQVSGQGDSLHEHIANLAGSPAIKKGILQTVKVVDELVKVMGRHKPENIVIEMARE
NQTTQKGQKNSRERMKRIEEGIKELGSQILKEHPVENTQLQNEKLYLYYLQNGRDMYVDQELDI
NRLSDYDVDHIVPQSFLKDDSIDNKVLTRSDKNRGKSDNVPSEEVVKKMKNYWRQLLNAKLITQR
KFDNLTKAERGGLSELDKAGFIKRQLVETRQITKHVAQILDSRMNTKYDENDKLIREVKVITLKSK
LVSDFRKDFQFYKVREINNYHHAHDAYLNAVVGTALIKKYPKLESEFVYGDYKVYDVRKMIAKSE
QEIGKATAKYFFYSNIMNFFKTEITLANGEIRKRPLIETNGETGEIVWDKGRDFATVRKVLSMPQV
NIVKKTEVQTGGFSKESIRPKRNSDKLIARKKDWDPKKYGGFVSPTVAYSVLVVAKVEKGKSKKLK
SVKELLGITIMERSSFEKNPIDFLEAKGYKEVKKDLIIKEPKYSLFELENGRKRMLASARFLQKGNE
LALPSKYVNFLYLASHYEKLKGSPEDNEQKQLFVEQHKHYLDEIIEQISEFSKRVILADANLDKVLS
AYNKHRDKPIREQAENIIHLFTLTNLGAPRAFKYFDTTIDRKVYRSTKEVLDATEIHQSITGEYETRI
DLSQLGGDSGGSGGSGGSTNLSDIIEKETGKQLVIQESILMLPEEVEEVIGNKPESDILVHTAY
DESTDENVMLLTSDAPEYKPWALVIQDSNGENKIKMLSGGSGGSGGSTNLSDIIEKETGKQL
VIQESILMLPEEVEEVIGNKPESDILVHTAYDESTDENVMLLTSDAPEYKPWALVIQDSNGEN
KIKMLSGGSKRTADGSEFEPKKKRKV
EE-SpCas9-NG base editor
(SEQ ID NO: 276)
MKRTADGSEFESPKKKRKVSSETGPVAVDPTLRRRIEPHEFEVFFDPRELRKETCLLYEINWG
GRHSIWRHTSQNTNKHVEVNFIEKFTTERYFCPNTRCSITWFLSWSPCGECSRAITEFLSRYP
HVTLFIYIARLYHHADPENRQGLEDLISSGVTIQIMTEQESGYCWRNFVNYSPSNEAHWPRY
PHLWVRLYVLELYCIILGLPPCLNILRRKQPQLTFFTIALQSCHYQRLPPHILWATGLKSGGSS
GGSSGSEYPGYSESAYPESSGGSSGGSDKKYSIGLAIGTNSVGWAVITDEYKVPSKKFKVLGNTDR
HSIKKNLIGALLFDSGETAEATRLKRTARRRYTRRKNRICYLQEIFSNEMAKVDDSFFHRLEESFLV
EEDKKHERHPIFGNIVDEVAYHEKYPTIYHLRKKLVDSTDKADLRLIYLALAHMIKFRGHFLIEGD
LNPDNSDVDKLFIQLVQTYNQLFEENPINASGVDAKAILSARLSKSRRLENLIAQLPGEKKNGLFG
NLIALSLGLTPNFKSNFDLAEDAKLQLSKDTYDDDLDNLLAQIGDQYADLFLAAKNLSDAILLSDIL
RVNTEITKAPLSASMIKRYDEHHQDLTLLKALVRQQLPEKYKEIFFDQSKNGYAGYIDGGASQEEF
YKFIKPILEKMDGTEELLVKLNREDLLRKQRTFDNGSIPHQIHLGELHAILRRQEDFYPFLKDNRE
KIEKILTFRIPYYVGPLARGNSRFAWMTRKSEETITPWNFEEVVDKGASAQSFIERMTNFDKNLPN
EKVLPKHSLLYEYFTVYNELTKVKYVTEGMRKPAFLSGEQKKAIVDLLFKTNRKVTVKQLKEDYF
KKIECFDSVEISGVEDRFNASLGTYHDLLKIIKDKDFLDNEENEDILEDIVLTLTLFEDREMIEERL
KTYAHLFDDKVMKQLKRRRYTGWGRLSRKLINGIRDKQSGKTILDFLKSDGFANRNFMQLIHDD
SLTFKEDIQKAQVSGQGDSLHEHIANLAGSPAIKKGILQTVKVVDELVKVMGRHKPENIVIEMARE
NQTTQKGQKNSRERMKRIEEGIKELGSQILKEHPVENTQLQNEKLYLYYLQNGRDMYVDQELDI
NRLSDYDVDHIVPQSFLKDDSIDNKVLTRSDKNRGKSDNVPSEEVVKKMKNYWRQLLNAKLITQR
KFDNLTKAERGGLSELDKAGFIKRQLVETRQITKHVAQILDSRMNTKYDENDKLIREVKVITLKSK
LVSDFRKDFQFYKVREINNYHHAHDAYLNAVVGTALIKKYPKLESEFVYGDYKVYDVRKMIAKSE
QEIGKATAKYFFYSNIMNFFKTEITLANGEIRKRPLIETNGETGEIVWDKGRDFATVRKVLSMPQV
NIVKKTEVQTGGFSKESIRPKRNSDKLIARKKDWDPKKYGGFVSPTVAYSVLVVAKVEKGKSKKLK
SVKELLGITIMERSSFEKNPIDFLEAKGYKEVKKDLIIKEPKYSLFELENGRKRMLASARFLQKGNE
LALPSKYVNFLYLASHYEKLKGSPEDNEQKQLFVEQHKHYLDEIIEQISEFSKRVILADANLDKVLS
AYNKHRDKPIREQAENIIHLFTLTNLGAPRAFKYFDTTIDRKVYRSTKEVLDATEIHQSITGEYETRI
DLSQLGGDSGGSGGSGGSTNLSDIIEKETGKQLVIQESILMLPEEVEEVIGNKPESDILVHTAY
DESTDENVMLLTSDAPEYKPWALVIQDSNGENKIKMLSGGSGGSGGSTNLSDIIEKETGKQL
VIQESILMLPEEVEEVIGNKPESDILVHTAYDESTDENVMLLTSDAPEYKPWALVIQDSNGEN
KIKMLSGGSKRTADGSEFEPKKKRKV
R33A + K34A-SpCas9-NG base editor
(SEQ ID NO: 277)
MKRTADGSEFESPKKKRKVSSETGPVAVDPTLRRRIEPHEFEVFFDPRELAAETCLLYEINWG
GRHSIWRHTSQNTNKHVEVNFIEKFTTERYFCPNTRCSITWFLSWSPCGECSRAITEFLSRYP
HVTLFIYIARLYHHADPRNRQGLRDLISSGVTIQIMTEQESGYCWRNFVNYSPSNEAHWPRY
PHLWVRLYVLELYCIILGLPPCLNILRRKQPQLTFFTIALQSCHYQRLPPHILWATGLKSGGSS
GGSSGSEYPGYSESAYPESSGGSSGGSDKKYSIGLAIGTNSVGWAVITDEYKVPSKKFKVLGNTDR
HSIKKNLIGALLFDSGETAEATRLKRTARRRYTRRKNRICYLQEIFSNEMAKVDDSFFHRLEESFLV
EEDKKHERHPIFGNIVDEVAYHEKYPTIYHLRKKLVDSTDKADLRLIYLALAHMIKFRGHFLIEGD
LNPDNSDVDKLFIQLVQTYNQLFEENPINASGVDAKAILSARLSKSRRLENLIAQLPGEKKNGLFG
NLIALSLGLTPNFKSNFDLAEDAKLQLSKDTYDDDLDNLLAQIGDQYADLFLAAKNLSDAILLSDIL
RVNTEITKAPLSASMIKRYDEHHQDLTLLKALVRQQLPEKYKEIFFDQSKNGYAGYIDGGASQEEF
YKFIKPILEKMDGTEELLVKLNREDLLRKQRTFDNGSIPHQIHLGELHAILRRQEDFYPFLKDNRE
KIEKILTFRIPYYVGPLARGNSRFAWMTRKSEETITPWNFEEVVDKGASAQSFIERMTNFDKNLPN
EKVLPKHSLLYEYFTVYNELTKVKYVTEGMRKPAFLSGEQKKAIVDLLFKTNRKVTVKQLKEDYF
KKIECFDSVEISGVEDRFNASLGTYHDLLKIIKDKDFLDNEENEDILEDIVLTLTLFEDREMIEERL
KTYAHLFDDKVMKQLKRRRYTGWGRLSRKLINGIRDKQSGKTILDFLKSDGFANRNFMQLIHDD
SLTFKEDIQKAQVSGQGDSLHEHIANLAGSPAIKKGILQTVKVVDELVKVMGRHKPENIVIEMARE
NQTTQKGQKNSRERMKRIEEGIKELGSQILKEHPVENTQLQNEKLYLYYLQNGRDMYVDQELDI
NRLSDYDVDHIVPQSFLKDDSIDNKVLTRSDKNRGKSDNVPSEEVVKKMKNYWRQLLNAKLITQR
KFDNLTKAERGGLSELDKAGFIKRQLVETRQITKHVAQILDSRMNTKYDENDKLIREVKVITLKSK
LVSDFRKDFQFYKVREINNYHHAHDAYLNAVVGTALIKKYPKLESEFVYGDYKVYDVRKMIAKSE
QEIGKATAKYFFYSNIMNFFKTEITLANGEIRKRPLIETNGETGEIVWDKGRDFATVRKVLSMPQV
NIVKKTEVQTGGFSKESIRPKRNSDKLIARKKDWDPKKYGGFVSPTVAYSVLVVAKVEKGKSKKLK
SVKELLGITIMERSSFEKNPIDFLEAKGYKEVKKDLIIKEPKYSLFELENGRKRMLASARFLQKGNE
LALPSKYVNFLYLASHYEKLKGSPEDNEQKQLFVEQHKHYLDEIIEQISEFSKRVILADANLDKVLS
AYNKHRDKPIREQAENIIHLFTLTNLGAPRAFKYFDTTIDRKVYRSTKEVLDATEIHQSITGEYETRI
DLSQLGGDSGGSGGSGGSTNLSDIIEKETGKQLVIQESILMLPEEVEEVIGNKPESDILVHTAY
DESTDENVMLLTSDAPEYKPWALVIQDSNGENKIKMLSGGSGGSGGSTNLSDIIEKETGKQL
VIQESILMLPEEVEEVIGNKPESDILVHTAYDESTDENVMLLTSDAPEYKPWALVIQDSNGEN
KIKMLSGGSKRTADGSEFEPKKKRKV
YE1-CP1028 base editor (YE1-BE4-CP1028, or YE1-CP)
(SEQ ID NO: 278)
MKRTADGSEFESPKKKRKVSSETGPVAVDPTLRRRIEPHEFEVFFDPRELRKETCLLYEINWG
GRHSIWRHTSQNTNKHVEVNFIEKFTTERYFCPNTRCSITWFLSYSPCGECSRAITEFLSRYP
HVTLFIYIARLYHHADPENRQGLRDLISSGVTIQIMTEQESGYCWRNFVNYSPSNEAHWPRY
PHLWVRLYVLELYCIILGLPPCLNILRRKQPQLTFFTIALQSCHYQRLPPHILWATGLKSGGSS
GGSSGSETPGTSESATPESSGGSSGGSEIGKATAKYFFYSNIMNFFKTEITLANGEIRKRPLIET
NGETGEIVWDKGRDFATVRKVLSMPQVNIVKKTEVQTGGFSKESILPKRNSDKLIARKKDW
DPKKYGGFDSPTVAYSVLVVAKVEKGKSKKLKSVKELLGITIMERSSFEKNPIDFLEAKGYK
EVKKDLIIKLPKYSLFELENGRKRMLASAGELQKGNELALPSKYVNFLYLASHYEKLKGSPE
DNEQKQLFVEQHKHYLDEIIEQISEFSKRVILADANLDKVLSAYNKHRDKPIREQAENIIHLF
TLTNLGAPAAFKYFDTTIDRKRYTSTKEVLDATLIHQSITGLYETRIDLSQLGGDGGSGGSGG
SGGSGGSGGSGGMDKKYSIGLAIGTNSVGWAVITDEYKVPSKKFKVLGNTDRHSIKKNLIGALLF
DSGETAEATRLKRTARRRYTRRKNRICYLQEIFSNEMAKVDDSFFHRLEESFLVEEDKKHERHPIF
GNIVDEVAYHEKYPTIYHLRKKLVDSTDKADLRLIYLALAHMIKFRGHFLIEGDLNPDNSDVDKLF
IQLVQTYNQLFEENPINASGVDAKAILSARLSKSRRLENLIAQLPGEKKNGLFGNLIALSLGLTPNF
KSNFDLAEDAKLQLSKDTYDDDLDNLLAQIGDQYADLFLAAKNLSDAILLSDILRVNTEITKAPLSA
SMIKRYDEHHQDLTLLKALVRQQLPEKYKEIFFDQSKNGYAGYIDGGASQEEFYKFIKPILEKMD
GTEELLVKLNREDLLRKQRTFDNGSIPHQIHLGELHAILRRQEDFYPFLKDNREKIEKILTFRIPYY
VGPLARGNSRFAWMTRKSEETITPWNFEEVVDKGASAQSFIERMTNFDKNLPNEKVLPKHSLLYE
YFTVYNELTKVKYVTEGMRKPAFLSGEQKKAIVDLLFKTNRKVTVKQLKEDYFKKIECFDSVEISG
VEDRFNASLGTYHDLLKIIKDKDFLDNEENEDILEDIVLTLTLFEDREMIEERLKTYAHLFDDKVM
KQLKRRRYTGWGRLSRKLINGIRDKQSGKTILDFLKSDGFANRNFMQLIHDDSLTFKEDIQKAQV
SGQGDSLHEHIANLAGSPAIKKGILQTVKVVDELVKVMGRHKPENIVIEMARENQTTQKGQKNSR
ERMKRIEEGIKELGSQILKEHPVENTQLQNEKLYLYYLQNGRDMYVDQELDINRLSDYDVDHIVP
QSFLKDDSIDNKVLTRSDKNRGKSDNVPSEEVVKKMKNYWRQLLNAKLITQRKFDNLTKAERGG
LSELDKAGFIKRQLVETRQITKHVAQILDSRMNTKYDENDKLIREVKVITLKSKLVSDFRKDFQFY
KVREINNYHHAHDAYLNAVVGTALIKKYPKLESEFVYGDYKVYDVRKMIAKSEQSGGSGGSGGSY
NLSDIIEKETGKQLVIQESILMLPEEVEEVIGNKPESDILVHTAYDESTDENVMLLTSDAPEYK
PWALVIQDSNGENKIKMLSGGSGGSGGSTNLSDIIEKETGKQLVIQESILMLPEEVEEVIGNKP
ESDILVHTAYDESTDENVMLLTSDAPEYKPWALVIQDSNGENKIKMLSGGSKRTADGSEFEP
KKKRKV
YE2-CP1028 base editor (YE2-BE4-CP1028)
(SEQ ID NO: 279)
MKRTADGSEFESPKKKRKVSSETGPVAVDPTLRRRIEPHEFEVFFDPRELRKETCLLYEINWG
GRHSIWRHTSQNTNKHVEVNFIEKFTTERYFCPNTRCSITWFLSYSPCGECSRAITEFLSRYP
HVTLFIYIARLYHHADPRNRQGLEDLISSGVTIQIMTEQESGYCWRNFVNYSPSNEAHWPRY
PHLWVRLYVLELYCIILGLPPCLNILRRKQPQLTFFTIALQSCHYQRLPPHILWATGLKSGGSS
GGSSGSETPGTSESATPESSGGSSGGSEIGKATAKYFFYSNIMNFFKTEITLANGEIRKRPLIET
NGETGEIVWDKGRDFATVRKVLSMPQVNIVKKTEVQTGGFSKESILPKRNSDKLIARKKDW
DPKKYGGFDSPTVAYSVLVVAKVEKGKSKKLKSVKELLGITIMERSSFEKNPIDFLEAKGYK
EVKKDLIIKLPKYSLFELENGRKRMLASAGELQKGNELALPSKYVNFLYLASHYEKLKGSPE
DNEQKQLFVEQHKHYLDEIIEQISEFSKRVILADANLDKVLSAYNKHRDKPIREQAENIIHLF
TLTNLGAPAAFKYFDTTIDRKRYTSTKEVLDATLIHQSITGLYETRIDLSQLGGDGGSGGSGG
SGGSGGSGGSGGMDKKYSIGLAIGTNSVGWAVITDEYKVPSKKFKVLGNTDRHSIKKNLIGALLF
DSGETAEATRLKRTARRRYTRRKNRICYLQEIFSNEMAKVDDSFFHRLEESFLVEEDKKHERHPIF
GNIVDEVAYHEKYPTIYHLRKKLVDSTDKADLRLIYLALAHMIKFRGHFLIEGDLNPDNSDVDKLF
IQLVQTYNQLFEENPINASGVDAKAILSARLSKSRRLENLIAQLPGEKKNGLFGNLIALSLGLTPNF
KSNFDLAEDAKLQLSKDTYDDDLDNLLAQIGDQYADLFLAAKNLSDAILLSDILRVNTEITKAPLSA
SMIKRYDEHHQDLTLLKALVRQQLPEKYKEIFFDQSKNGYAGYIDGGASQEEFYKFIKPILEKMD
GTEELLVKLNREDLLRKQRTFDNGSIPHQIHLGELHAILRRQEDFYPFLKDNREKIEKILTFRIPYY
VGPLARGNSRFAWMTRKSEETITPWNFEEVVDKGASAQSFIERMTNFDKNLPNEKVLPKHSLLYE
YFTVYNELTKVKYVTEGMRKPAFLSGEQKKAIVDLLFKTNRKVTVKQLKEDYFKKIECFDSVEISG
VEDRFNASLGTYHDLLKIIKDKDFLDNEENEDILEDIVLTLTLFEDREMIEERLKTYAHLFDDKVM
KQLKRRRYTGWGRLSRKLINGIRDKQSGKTILDFLKSDGFANRNFMQLIHDDSLTFKEDIQKAQV
SGQGDSLHEHIANLAGSPAIKKGILQTVKVVDELVKVMGRHKPENIVIEMARENQTTQKGQKNSR
ERMKRIEEGIKELGSQILKEHPVENTQLQNEKLYLYYLQNGRDMYVDQELDINRLSDYDVDHIVP
QSFLKDDSIDNKVLTRSDKNRGKSDNVPSEEVVKKMKNYWRQLLNAKLITQRKFDNLTKAERGG
LSELDKAGFIKRQLVETRQITKHVAQILDSRMNTKYDENDKLIREVKVITLKSKLVSDFRKDFQFY
KVREINNYHHAHDAYLNAVVGTALIKKYPKLESEFVYGDYKVYDVRKMIAKSEQSGGSGGSGGST
NLSDIIEKETGKQLVIQESILMLPEEVEEVIGNKPESDILVHTAYDESTDENVMLLTSDAPEYK
PWALVIQDSNGENKIKMLSGGSGGSGGSTNLSDIIEKETGKQLVIQESILMLPEEVEEVIGNKP
ESDILVHTAYDESTDENVMLLTSDAPEYKPWALVIQDSNGENKIKMLSGGSKRTADGSEFEP
KKKRKV
YEE-CP1028 base editor (YEE-BE4-CP1028)
(SEQ ID NO: 280)
MKRTADGSEFESPKKKRKVSSETGPVAVDPTLRRRIEPHEFEVFFDPRELRKETCLLYEINWG
GRHSIWRHTSQNTNKHVEVNFIEKFTTERYFCPNTRCSITWFLSYSPCGECSRAITEFLSRYP
HVTLFIYIARLYHHADPENRQGLEDLISSGVTIQIMTEQESGYCWRNFVNYSPSNEAHWPRY
PHLWVRLYVLELYCIILGLPPCLNILRRKQPQLTFFTIALQSCHYQRLPPHILWATGLKSGGSS
GGSSGSETPGTSESATPESSGGSSGGSEIGKATAKYFFYSNIMNFFKTEITLANGEIRKRPLIET
NGETGEIVWDKGRDFATVRKVLSMPQVNIVKKTEVQTGGFSKESILPKRNSDKLIARKKDW
DPKKYGGFDSPTVAYSVLVVAKVEKGKSKKLKSVKELLGITIMERSSFEKNPIDFLEAKGYK
EVKKDLIIKLPKYSLFELENGRKRMLASAGELQKGNELALPSKYVNFLYLASHYEKLKGSPE
DNEQKQLFVEQHKHYLDEIIEQISEFSKRVILADANLDKVLSAYNKHRDKPIREQAENIIHLF
TLTNLGAPAAFKYFDTTIDRKRYTSTKEVLDATLIHQSITGLYETRIDLSQLGGDGGSGGSGG
SGGSGGSGGSGGMDKKYSIGLAIGTNSVGWAVITDEYKVPSKKFKVLGNTDRHSIKKNLIGALLF
DSGETAEATRLKRTARRRYTRRKNRICYLQEIFSNEMAKVDDSFFHRLEESFLVEEDKKHERHPIF
GNIVDLVAYHEKYPTIYHLRKKLVDSTDKADLRLIYLALAHMIKFRGHFLIEGDLNPDNSDVDKLF
IQLVQTYNQLFEENPINASGVDAKAILSARLSKSRRLENLIAQLPGEKKNGLFGNLIALSLGLTPNF
KSNFDLAEDAKLQLSKDTYDDDLDNLLAQIGDQYADLFLAAKNLSDAILLSDILRVNTEITKAPLSA
SMIKRYDEHHQDLTLLKALVRQQLPEKYKEIFFDQSKNGYAGYIDGGASQEEFYKFIKPILEKMD
GTEELLVKLNREDLLRKQRTFDNGSIPHQIHLGELHAILRRQEDFYPFLKDNREKIEKILTFRIPYY
VGPLARGNSRFAWMTRKSEETITPWNFEEVVDKGASAQSFIERMTNFDKNLPNEKVLPKHSLLYE
YFTVYNELTKVKYVTEGMRKPAFLSGEQKKAIVDLLFKTNRKVTVKQLKEDYFKKIECFDSVEISG
VEDRFNASLGTYHDLLKIIKDKDFLDNEENEDILEDIVLTLTLFEDREMIEERLKTYAHLFDDKVM
KQLKRRRYTGWGRLSRKLINGIRDKQSGKTILDFLKSDGFANRNFMQLIHDDSLTFKEDIQKAQV
SGQGDSLHEHIANLAGSPAIKKGILQTVKVVDELVKVMGRHKPENIVIEMARENQTTQKGQKNSR
ERMKRIEEGIKELGSQILKEHPVENTQLQNEKLYLYYLQNGRDMYVDQELDINRESDYDVDHIVP
QSFLKDDSIDNKVLTRSDKNRGKSDNVPSEEVVKKMKNYWRQLLNAKLITQRKFDNLTKAERGG
LSELDKAGFIKRQLVETRQITKHVAQILDSRMNTKYDENDKLIREVKVITLKSKLVSDFRKDFQFY
KVREINNYHHAHDAYLNAWGTALIKKYPKLESEFVYGDYKVYDVRKMIAKSEQSGGSGGSGGSY
NLSDIIEKETGKQLVIQESILMLPEEVEEVIGNKPESDILVHTAYDESTDENVMLLTSDAPEYK
PWALVIQDSNGENKIKMLSGGSGGSGGSTNLSDIIEKETGKQLVIQESILMLPEEVEEVIGNKP
ESDILVHTAYDESTDENVMLLTSDAPEYKPWALVIQDSNGENKIKMLSGGSKRTADGSEFEP
KKKRKV
EE-CP1028 base editor (EE-BE4-CP1028)
(SEQ ID NO: 281)
MKRTADGSEFESPKKKRKVSSETGPVAVDPTLRRRIEPHEFEVFFDPRELRKETCLLYEINWG
GRHSIWRHTSQNTNKHVEVNFIEKFTTERYFCPNTRCSITWFLSWSPCGECSRAITEFLSRYP
HVTLFIYIARLYHHADPENRQGLEDLISSGVTIQIMTEQESGYCWRNFVNYSPSNEAHWPRY
PHLWVRLYVLELYCIILGLPPCLNILRRKQPQLTFFTIALQSCHYQRLPPHILWATGLKSGGSS
GGSSGSETPGTSESATPESSGGSSGGSEIGKATAKYFFYSNIMNFFKTEITLANGEIRKRPLIET
NGETGEIVWDKGRDFATVRKVLSMPQVNIVKKTEVQTGGFSKESILPKRNSDKLIARKKDW
DPKKYGGFDSPTVAYSVLVVAKVEKGKSKKLKSVKELLGITIMERSSFEKNPIDFLEAKGYK
EVKKDLIIKLPKYSLFELENGRKRMLASAGELQKGNELALPSKYVNFLYLASHYEKLKGSPE
DNEQKQLFVEQHKHYLDEIIEQISEFSKRVILADANLDKVLSAYNKHRDKPIREQAENIIHLF
TLTNLGAPAAFKYFDTTIDRKRYTSTKEVLDATLIHQSITGLYETRIDLSQLGGDGGSGGSGG
SGGSGGSGGSGGMDKKYSIGLAIGTNSVGWAVITDEYKVPSKKFKVLGNTDRHSIKKNLIGALLF
DSGETAEATRLKRTARRRYTRRKNRICYLQEIFSNEMAKVDDSFFHRLEESFLVEEDKKHERHPIF
GNIVDEVAYHEKYPTIYHLRKKLVDSTDKADLRLIYLALAHMIKFRGHFLIEGDLNPDNSDVDKLF
IQLVQTYNQLFEENPINASGVDAKAILSARLSKSRRLENLIAQLPGEKKNGLFGNLIALSLGLTPNF
KSNFDLAEDAKLQLSKDTYDDDLDNLLAQIGDQYADLFLAAKNLSDAILLSDILRVNTEITKAPLSA
SMIKRYDEHHQDLTLLKALVRQQLPEKYKEIFFDQSKNGYAGYIDGGASQEEFYKFIKPILEKMD
GTEELLVKLNREDLLRKQRTFDNGSIPHQIHEGELHAILRRQEDFYPFLKDNREKIEKILTFRIPYY
VGPLARGNSRFAWMTRKSEETITPWNFEEVVDKGASAQSFIERMTNFDKNLPNEKVLPKHSLLYE
YFTVYNELTKVKYVTEGMRKPAFLSGEQKKAIVDLLFKTNRKVTVKQLKEDYFKKIECFDSVEISG
VEDRFNASLGTYHDLLKIIKDKDFLDNEENEDILEDIVLTLTLFEDREMIEERLKTYAHLFDDKVM
KQLKRRRYTGWGRLSRKLINGIRDKQSGKTILDFLKSDGFANRNFMQLIHDDSLTFKEDIQKAQV
SGQGDSLHEHIANLAGSPAIKKGILQTVKVVDELVKVMGRHKPENIVIEMARENQTTQKGQKNSR
ERMKRIEEGIKELGSQILKEHPVENTQLQNEKEYLYYLQNGRDMYVDQELDINRLSDYDVDHIVP
QSFLKDDSIDNKVLTRSDKNRGKSDNVPSEEVVKKMKNYWRQLLNAKLITQRKFDNLTKAERGG
LSELDKAGFIKRQLVETRQITKHVAQILDSRMNTKYDENDKLIREVKVITLKSKLVSDFRKDFQFY
KVREINNYHHAHDAYLNAVVGTALIKKYPKLESEFVYGDYKVYDVRKMIAKSEQSGGSGGSGGSY
NLSDIIEKETGKQLVIQESILMLPEEVEEVIGNKPESDILVHTAYDESTDENVMLLTSDAPEYK
PWALVIQDSNGENKIKMLSGGSGGSGGSTNLSDIIEKETGKQLVIQESILMLPEEVEEVIGNKP
ESDILVHTAYDESTDENVMLLTSDAPEYKPWALVIQDSNGENKIKMLSGGSKRTADGSEFEP
KKKRKV
R33A + K34A-CP1028 base editor (R33A + 34A-BE4-CP1028)
(SEQ ID NO: 282)
MKRTADGSEFESPKKKRKVSSETGPVAVDPTLRRRIEPHEFEVFFDPRELAAETCLLYEINWG
GRHSIWRHTSQNTNKHVEVNFIEKFTTERYFCPNTRCSITWFLSWSPCGECSRAITEFLSRYP
HVTLFIYIARLYHHADPRNRQGLRDLISSGVTIQIMTEQESGYCWRNFVNYSPSNEAHWPRY
PHLWVRLYVLELYCIILGLPPCLNILRRKQPQLTFFTIALQSCHYQRLPPHILWATGLKSGGSS
GGSSGSETPGTSESATPESSGGSSGGSEIGKATAKYFFYSNIMNFFKTEITLANGEIRKRPLIET
NGETGEIVWDKGRDFATVRKVLSMPQVNIVKKTEVQTGGFSKESILPKRNSDKLIARKKDW
DPKKYGGFDSPTVAYSVLVVAKVEKGKSKKLKSVKELLGITIMERSSFEKNPIDFLEAKGYK
EVKKDLIIKLPKYSLFELENGRKRMLASAGELQKGNELALPSKYVNFLYLASHYEKLKGSPE
DNEQKQLFVEQHKHYLDEIIEQISEFSKRVILADANLDKVLSAYNKHRDKPIREQAENIIHLF
TLTNLGAPAAFKYFDTTIDRKRYTSTKEVLDATLIHQSITGLYETRIDLSQLGGDGGSGGSGG
SGGSGGSGGSGGMDKKYSIGLAIGTNSVGWAVITDEYKVPSKKFKVLGNTDRHSIKKNLIGALLF
DSGETAEATRLKRTARRRYTRRKNRICYLQEIFSNEMAKVDDSFFHRLEESFLVEEDKKHERHPIF
GNIVDEVAYHEKYPTIYHLRKKLVDSTDKADLRLIYLALAHMIKFRGHFLIEGDLNPDNSDVDKLF
IQLVQTYNQLFEENPINASGVDAKAILSARLSKSRRLENLIAQLPGEKKNGLFGNLIALSLGLTPNF
KSNFDLAEDAKLQLSKDTYDDDLDNLLAQIGDQYADLFLAAKNLSDAILLSDILRVNTEITKAPLSA
SMIKRYDEHHQDLTLLKALVRQQLPEKYKEIFFDQSKNGYAGYIDGGASQEEFYKFIKPIELKMD
GTEELLVKLNREDLLRKQRTFDNGSIPHQIHLGELHAILRRQEDFYPFLKDNREKIEKILTFRIPYY
VGPLARGNSRFAWMTRKSEETITPWNFEEVVDKGASAQSFIERMTNFDKNLPNLEKVLPKHSLLYE
YFTVYNELTKVKYVTEGMRKPAFLSGEQKKAIVDLLFKTNRKVTVKQLKEDYFKKIECFDSVEISG
VEDRFNASLGTYHDLLKIIKDKDFLDNEENEDILEDIVLTLTLFEDREMIEERLKTYAHLFDDKVM
KQLKRRRYTGWGRLSRKLINGIRDKQSGKTILDFLKSDGFANRNFMQLIHDDSLTFKEDIQKAQV
SGQGDSLHEHIANLAGSPAIKKGILQTVKVVDELVKVMGRHKPENIVIEMARENQTTQKGQKNSR
ERMKRIEEGIKELGSQILKEHPVENTQLQNEKLYLYYLQNGRDMYVDQELDINRLSDYDVDHIVP
QSFLKDDSIDNKVLTRSDKNRGKSDNVPSEEVVKKMKNYWRQLLNAKLITQRKFDNLTKAERGG
LSELDKAGFIKRQLVETRQITKHVAQILDSRMNTKYDENDKLIREVKVITLKSKLVSDFRKDFQFY
KVREINNYHHAHDAYLNAVVGTALIKKYPKLESEFVYGDYKVYDVRKMIAKSEQSGGSGGSGGSY
NLSDIIEKETGKQLVIQESILMLPEEVEEVIGNKPESDILVHTAYDESTDENVMLLTSDAPEYK
PWALVIQDSNGENKIKMLSGGSGGSGGSTNLSDIIEKETGKQLVIQESILMLPEEVEEVIGNKP
ESDILVHTAYDESTDENVMLLTSDAPEYKPWALVIQDSNGENKIKMLSGGSKRTADGSEFEP
KKKRKV

[0172] These disclosed CBEs exhibit low off-target editing frequencies, and in particular low Cas9-independent off-target editing frequencies, while exhibiting high on-target editing efficiencies. For example, the YE1-BE4, YE1-CP1028, YE1-SpCas9-NG, R33A-BE4, and R33A+K34A-BE4-CP1028 base editors may exhibit off-target editing frequencies of less than 0.75% (e.g., about 0.4% or less) while maintaining on-target editing efficiencies of about 60% or more, in target sequences in mammalian cells. (See, e.g., FIGS. 11, 15A, 15B and 17.) The Examples of the present disclosure suggest that CBEs with cytidine deaminases that have a low instrinsic catalytic efficiency (k_{cat}/Kₘ) for cytosine-containing ssDNA substrates exhibit reduced Cas9-independent off-target deamination.

### NapDNAbP Domains

[0173] cytidine deaminase The base editors described herein comprise a nucleic acid programmable DNA binding (napDNAbp) domain. The napDNAbp is associated with at least one guide nucleic acid (e.g., guide RNA), which localizes the napDNAbp to a DNA sequence that comprises a DNA strand (i.e., a target strand) that is complementary to the guide nucleic acid, or a portion thereof (e.g., the protospacer of a guide RNA). In other words, the guide nucleic-acid “programs” the napDNAbp domain to localize and bind to a complementary sequence of the target strand. Binding of the napDNAbp domain to a complementary sequence enables the nucleobase modification domain of the base editor to access and enzymatically deaminate a target cytosine base in the target strand.

[0174] The napDNAbp can be a CRISPR (clustered regularly interspaced short palindromic repeat)-associated nuclease. As outlined above, CRISPR is an adaptive immune system that provides protection against mobile genetic elements (viruses, transposable elements and conjugative plasmids). CRISPR clusters contain spacers, sequences complementary to antecedent mobile elements, and target invading nucleic acids. CRISPR clusters are transcribed and processed into CRISPR RNA (crRNA). In type II CRISPR systems correct processing of pre-crRNA requires a trans-encoded small RNA (tracrRNA), endogenous ribonuclease 3 (rnc) and a Cas9 protein. The tracrRNA serves as a guide for ribonuclease 3-aided processing of pre-crRNA. Subsequently, Cas9/crRNA/tracrRNA endonucleolytically cleaves linear or circular dsDNA target complementary to the spacer. The target strand not complementary to crRNA is first cut endonucleolytically, then trimmed 3′-5′ exonucleolytically. In nature, DNA-binding and cleavage typically requires protein and both RNAs. However, single guide RNAs (“sgRNA”, or simply “gNRA”) can be engineered so as to incorporate aspects of both the crRNA and tracrRNA into a single RNA species. See, e.g., Jinek et al., Science 337:816-821(2012), the entire contents of which is hereby incorporated by reference.

[0175] Without wishing to be bound by any particular theory, the binding mechanism of a napDNAbp-guide RNA complex, in general, includes the step of forming an R-loop whereby the napDNAbp induces the unwinding of a double-strand DNA target, thereby separating the strands in the region bound by the napDNAbp. The guideRNA protospacer then hybridizes to the “target strand.” This displaces a “non-target strand” that is complementary to the target strand, which forms the single strand region of the R-loop. In some embodiments, the napDNAbp includes one or more nuclease activities, which cuts the DNA leaving various types of lesions (e.g., a nick in one strand of the DNA). For example, the napDNAbp may comprises a nuclease activity that cuts the non-target strand at a first location, and/or cuts the target strand at a second location. Depending on the nuclease activity, the target DNA can be cut to form a “double-stranded break” whereby both strands are cut. In other embodiments, the target DNA can be cut at only a single site, i.e., the DNA is “nicked” on one strand.

[0176] The below description of various napDNAbps which can be used in connection with the disclosed nucleobase modification domains is not meant to be limiting in any way. The base editors may comprise the canonical SpCas9, or any ortholog Cas9 protein, or any variant Cas9 protein-including any naturally occurring variant, mutant, or otherwise engineered version of Cas9—that is known or which can be made or evolved through a directed evolution or otherwise mutagenic process. In various embodiments, the napDNAbp has a nickase activity, i.e., only cleave one strand of the target DNA sequence. In other embodiments, the napDNAbp has an inactive nuclease, e.g., are “dead” proteins. Other variant Cas9 proteins that may be used are those having a smaller molecular weight than the canonical SpCas9 (e.g., for easier delivery) or having modified or rearranged primary amino acid sequence (e.g., the circular permutant forms). The base editors described herein may also comprise Cas9 equivalents, including Cas12a/Cpf1 and Cas12b proteins. The napDNAbps used herein (e.g., an SpCas9 or SpCas9 variant) may also contain various modifications that alter/enhance their PAM specifities. The disclosure contemplates any Cas9, Cas9 variant, or Cas9 equivalent which has at least 70%, at least 75%, at least 80%, at least 85%, at least 90%, at least 91%, at least 92%, at least 93%, at least 94%, at least 95%, at least 96%, at least 97%, at least 98%, at least 99%, or at least 99.9% sequence identity to a reference Cas9 sequence, such as a reference SpCas9 canonical sequence (set forth in SEQ ID NO: 213), a reference SaCas9 canonical sequence (set forth in SEQ ID NO: 216) or a reference Cas9 equivalent (e.g., Cas12a/Cpf1).

[0177] In some embodiments, the napDNAbp directs cleavage of one or both strands at the location of a target sequence, such as within the target sequence and/or within the complement of the target sequence. In some embodiments, the napDNAbp directs cleavage of one or both strands within about 1, 2, 3, 4, 5, 6, 7, 8, 9, 10, 15, 20, 25, 50, 100, 200, 500, or more base pairs from the first or last nucleotide of a target sequence. For example, an aspartate-to-alanine substitution (D10A) in the RuvC I catalytic domain of Cas9 from S. pyogenes converts Cas9 from a nuclease that cleaves both strands to a nickase (cleaves a single strand). Other examples of mutations that render Cas9 a nickase include, without limitation, H840A, N854A, and N863A in reference to the canonical SpCas9 sequence, or to equivalent amino acid positions in other Cas9 variants or Cas9 equivalents.

[0178] As used herein, the term “Cas protein” refers to a full-length Cas protein obtained from nature, a recombinant Cas protein having a sequences that differs from a naturally occurring Cas protein, or any fragment of a Cas protein that nevertheless retains all or a significant amount of the requisite basic functions needed for the disclosed methods, i.e., (i) possession of nucleic-acid programmable binding of the Cas protein to a target DNA, and (ii) ability to nick the target DNA sequence on one strand. The Cas proteins contemplated herein embrace CRISPR Cas9 proteins, as well as Cas9 equivalents, variants (e.g., Cas9 nickase (nCas9) or nuclease inactive Cas9 (dCas9)) homologs, orthologs, or paralogs, whether naturally occurring or non-naturally occurring (e.g., engineered or recombinant), and may include a Cas9 equivalent from any type of CRISPR system (e.g., type II, V, VI), including Cpf1 (a type-V CRISPR-Cas systems), C2c1 (a type V CRISPR-Cas system), C2c2 (a type VI CRISPR-Cas system) and C2c3 (a type V CRISPR-Cas system). Further Cas-equivalents are described in Makarova et al., “C2c2 is a single-component programmable RNA-guided RNA-targeting CRISPR effector,” Science 2016; 353(6299), the contents of which are incorporated herein by reference.

[0179] The term “Cas9” or “Cas9 domain” embraces any naturally occurring Cas9 from any organism, any naturally-occurring Cas9 equivalent or functional fragment thereof, any Cas9 homolog, ortholog, or paralog from any organism, and any mutant or variant of a Cas9, naturally-occurring or engineered. The term Cas9 is not meant to be particularly limiting and may be referred to as a “Cas9 or equivalent.” Exemplary Cas9 proteins are further described herein and/or are described in the art and are incorporated herein by reference. The present disclosure is unlimited with regard to the particular napDNAbp that is employed in the base editors of the disclosure.

[0180] Additional Cas9 sequences and structures are well known to those of skill in the art (see, e.g., “Complete genome sequence of an M1 strain of Streptococcus pyogenes.” Ferretti et al., Proc. Natl. Acad. Sci. U.S.A. 98:4658-4663(2001); “CRISPR RNA maturation by trans-encoded small RNA and host factor RNase III.” Deltcheva E., et al., Nature 471:602-607(2011); and “A programmable dual-RNA-guided DNA endonuclease in adaptive bacterial immunity.” Jinek M., Chylinski K., Fonfara I., Hauer M., Doudna J. A., Charpentier E. Science 337:816-821(2012), the entire contents of each of which are incorporated herein by reference), and also provided below.

[0181] Examples of Cas9 and Cas9 equivalents are provided as follows; however, these specific examples are not meant to be limiting. The base editors of the present disclosure may use any suitable napDNAbp, including any suitable Cas9 or Cas9 equivalent.

### Wild Type Canonical SpCas9

[0182] In one embodiment, the base editor constructs described herein may comprise the “canonical SpCas9” nuclease from S. pyogenes, which has been widely used as a tool for genome engineering. This Cas9 protein is a large, multi-domain protein containing two distinct nuclease domains. Point mutations can be introduced into Cas9 to abolish one or both nuclease activities, resulting in a nickase Cas9 (nCas9) or dead Cas9 (dCas9), respectively, that still retains its ability to bind DNA in a sgRNA-programmed manner. In principle, when fused to another protein or domain, Cas9 or variant thereof (e.g., nCas9) can target that protein to virtually any DNA sequence simply by co-expression with an appropriate sgRNA. As used herein, the canonical SpCas9 protein refers to the wild type protein from Streptococcus pyogenes having the following amino acid sequence:

| | | SEQ |
|---|---|---|
| | | ID |
| Description | Sequence | NO: |
| SpCas 9 | MDKKYSIGLDIGTNSVGWAV | SEQ |
| Streptococcus | ITDEYKVPSKKFKVLGNTDR | ID |
| pyogenes | HSIKKNLIGALLFDSGETAE | NO: |
| M1 | ATRLKRTARRRYTRRKNRIC | 213 |
| SwissProt | YLQEIFSNEMAKVDDSFFHR | |
| Accession | LEESFLVEEDKKHERHPIFG | |
| No. Q99ZW2 | NIVDEVAYHEKYPTIYHLRK | |
| Wild type | KLVDSTDKADLRLIYLALAH | |
| | MIKFRGHFLIEGDLNPDNSD | |
| | VDKLFIQLVQTYNQLFEENP | |
| | INASGVDAKAILSARLSKSR | |
| | RLENLIAQLPGEKKNGLFGN | |
| | LIALSLGLTPNFKSNFDLAE | |
| | DAKLQLSKDTYDDDLDNLLA | |
| | QIGDQYADLFLAAKNLSDAI | |
| | LLSDILRVNTEITKAPLSAS | |
| | MIKRYDEHHQDLTLLKALVR | |
| | QQLPEKYKEIFFDQSKNGYA | |
| | GYIDGGASQEEFYKFIKPIL | |
| | EKMDGTEELLVKLNREDLLR | |
| | KQRTFDNGSIPHQIHLGELH | |
| | AILRRQEDFYPFLKDNREKI | |
| | EKILTFRIPYYVGPLARGNS | |
| | RFAWMTRKSEETITPWNFEE | |
| | VVDKGASAQSFIERMTNFDK | |
| | NLPNEKVLPKHSLLYEYFTV | |
| | YNELTKVKYVTEGMRKPAFL | |
| | SGEQKKAIVDLLFKTNRKVT | |
| | VKQLKEDYFKKIECFDSVEI | |
| | SGVEDRFNASLGTYHDLLKI | |
| | IKDKDFLDNEENEDILEDIV | |
| | LTLTLFEDREMIEERLKTYA | |
| | HLFDDKVMKQLKRRRYTGWG | |
| | RLSRKLINGIRDKQSGKTIL | |
| | DFLKSDGFANRNFMQLIHDD | |
| | SLTFKEDIQKAQVSGQGDSL | |
| | HEHIANLAGSPAIKKGILQT | |
| | VKVVDELVKVMGRHKPENIV | |
| | IEMARENQTTQKGQKNSRER | |
| | MKRIEEGIKELGSQILKEHP | |
| | VENTQLQNEKLYLYYLQNGR | |
| | DMYVDQELDINRLSDYDVDH | |
| | IVPQSFLKDDSIDNKVLTRS | |
| | DKNRGKSDNVPSEEVVKKMK | |
| | NYWRQLLNAKLITQRKFDNL | |
| | TKAERGGLSELDKAGFIKRQ | |
| | LVETRQITKHVAQILDSRMN | |
| | TKYDENDKLIREVKVITLKS | |
| | KLVSDFRKDFQFYKVREINN | |
| | YHHAHDAYLNAVVGTALIKK | |
| | YPKLESEFVYGDYKVYDVRK | |
| | MIAKSEQEIGKATAKYFFYS | |
| | NIMNFFKTEITLANGEIRKR | |
| | PLIETNGETGEIVWDKGRDF | |
| | ATVRKVLSMPQVNIVKKTEV | |
| | QTGGFSKESILPKRNSDKLI | |
| | ARKKDWDPKKYGGFDSPTVA | |
| | YSVLVVAKVEKGKSKKLKSV | |
| | KELLGITIMERSSFEKNPID | |
| | FLEAKGYKEVKKDLIIKLPK | |
| | YSLFELENGRKRMLASAGEL | |
| | QKGNELALPSKYVNFLYLAS | |
| | HYEKLKGSPEDNEQKQLFVE | |
| | QHKHYLDEIIEQISEFSKRV | |
| | ILADANLDKVLSAYNKHRDK | |
| | PIREQAENIIHLFTLTNLGA | |
| | PAAFKYFDTTIDRKRYTSTK | |
| | EVLDATLIHQSITGLYETRI | |
| | DLSQLGGD | |
| SpCas 9 | ATGGATAAAAAATATAGCAT | SEQ |
| Reverse | TGGCCTGGATATTGGCACCA | ID |
| translation | ACAGCGTGGGCTGGGCGGTG | NO: |
| of | ATTACCGATGAATATAAAGT | 1 |
| SwissProt | GCCGAGCAAAAAATTTAAAG | |
| Accession | TGCTGGGCAACACCGATCGC | |
| No. Q99ZW2 | CATAGCATTAAAAAAAACCT | |
| Streptococcus | GATTGGCGCGCTGCTGTTTG | |
| pyogenes | ATAGCGGCGAAACCGCGGAA | |
| | GCGACCCGCCTGAAACGCAC | |
| | CGCGCGCCGCCGCTATACCC | |
| | GCCGCAAAAACCGCATTTGC | |
| | TATCTGCAGGAAATTTTTAG | |
| | CAACGAAATGGCGAAAGTGG | |
| | ATGATAGCTTTTTTCATCGC | |
| | CTGGAAGAAAGCTTTCTGGT | |
| | GGAAGAAGATAAAAAACATG | |
| | AACGCCATCCGATTTTTGGC | |
| | AACATTGTGGATGAAGTGGC | |
| | GTATCATGAAAAATATCCGA | |
| | CCATTTATCATCTGCGCAAA | |
| | AAACTGGTGGATAGCACCGA | |
| | TAAAGCGGATCTGCGCCTGA | |
| | TTTATCTGGCGCTGGCGCAT | |
| | ATGATTAAATTTCGCGGCCA | |
| | TTTTCTGATTGAAGGCGATC | |
| | TGAACCCGGATAACAGCGAT | |
| | GTGGATAAACTGTTTATTCA | |
| | GCTGGTGCAGACCTATAACC | |
| | AGCTGTTTGAAGAAAACCCG | |
| | ATTAACGCGAGCGGCGTGGA | |
| | TGCGAAAGCGATTCTGAGCG | |
| | CGCGCCTGAGCAAAAGCCGC | |
| | CGCCTGGAAAACCTGATTGC | |
| | GCAGCTGCCGGGCGAAAAAA | |
| | AAAACGGCCTGTTTGGCAAC | |
| | CTGATTGCGCTGAGCCTGGG | |
| | CCTGACCCCGAACTTTAAAA | |
| | GCAACTTTGATCTGGCGGAA | |
| | GATGCGAAACTGCAGCTGAG | |
| | CAAAGATACCTATGATGATG | |
| | ATCTGGATAACCTGCTGGCG | |
| | CAGATTGGCGATCAGTATGC | |
| | GGATCTGTTTCTGGCGGCGA | |
| | AAAACCTGAGCGATGCGATT | |
| | CTGCTGAGCGATATTCTGCG | |
| | CGTGAACACCGAAATTACCA | |
| | AAGCGCCGCTGAGCGCGAGC | |
| | ATGATTAAACGCTATGATGA | |
| | ACATCATCAGGATCTGACCC | |
| | TGCTGAAAGCGCTGGTGCGC | |
| | CAGCAGCTGCCGGAAAAATA | |
| | TAAAGAAATTTTTTTTGATC | |
| | AGAGCAAAAACGGCTATGCG | |
| | GGCTATATTGATGGCGGCGC | |
| | GAGCCAGGAAGAATTTTATA | |
| | AATTTATTAAACCGATTCTG | |
| | GAAAAAATGGATGGCACCGA | |
| | AGAACTGCTGGTGAAACTGA | |
| | ACCGCGAAGATCTGCTGCGC | |
| | AAACAGCGCACCTTTGATAA | |
| | CGGCAGCATTCCGCATCAGA | |
| | TTCATCTGGGCGAACTGCAT | |
| | GCGATTCTGCGCCGCCAGGA | |
| | AGATTTTTATCCGTTTCTGA | |
| | AAGATAACCGCGAAAAAATT | |
| | GAAAAAATTCTGACCTTTCG | |
| | CATTCCGTATTATGTGGGCC | |
| | CGCTGGCGCGCGGCAACAGC | |
| | CGCTTTGCGTGGATGACCCG | |
| | CAAAAGCGAAGAAACCATTA | |
| | CCCCGTGGAACTTTGAAGAA | |
| | GTGGTGGATAAAGGCGCGAG | |
| | CGCGCAGAGCTTTATTGAAC | |
| | GCATGACCAACTTTGATAAA | |
| | AACCTGCCGAACGAAAAAGT | |
| | GCTGCCGAAACATAGCCTGC | |
| | TGTATGAATATTTTACCGTG | |
| | TATAACGAACTGACCAAAGT | |
| | GAAATATGTGACCGAAGGCA | |
| | TGCGCAAACCGGCGTTTCTG | |
| | AGCGGCGAACAGAAAAAAGC | |
| | GATTGTGGATCTGCTGTTTA | |
| | AAACCAACCGCAAAGTGACC | |
| | GTGAAACAGCTGAAAGAAGA | |
| | TTATTTTAAAAAAATTGAAT | |
| | GCTTTGATAGCGTGGAAATT | |
| | AGCGGCGTGGAAGATCGCTT | |
| | TAACGCGAGCCTGGGCACCT | |
| | ATCATGATCTGCTGAAAATT | |
| | ATTAAAGATAAAGATTTTCT | |
| | GGATAACGAAGAAAACGAAG | |
| | ATATTCTGGAAGATATTGTG | |
| | CTGACCCTGACCCTGTTTGA | |
| | AGATCGCGAAATGATTGAAG | |
| | AACGCCTGAAAACCTATGCG | |
| | CATCTGTTTGATGATAAAGT | |
| | GATGAAACAGCTGAAACGCC | |
| | GCCGCTATACCGGCTGGGGC | |
| | CGCCTGAGCCGCAAACTGAT | |
| | TAACGGCATTCGCGATAAAC | |
| | AGAGCGGCAAAACCATTCTG | |
| | GATTTTCTGAAAAGCGATGG | |
| | CTTTGCGAACCGCAACTTTA | |
| | TGCAGCTGATTCATGATGAT | |
| | AGCCTGACCTTTAAAGAAGA | |
| | TATTCAGAAAGCGCAGGTGA | |
| | GCGGCCAGGGCGATAGCCTG | |
| | CATGAACATATTGCGAACCT | |
| | GGCGGGCAGCCCGGCGATTA | |
| | AAAAAGGCATTCTGCAGACC | |
| | GTGAAAGTGGTGGATGAACT | |
| | GGTGAAAGTGATGGGCCGCC | |
| | ATAAACCGGAAAACATTGTG | |
| | ATTGAAATGGCGCGCGAAAA | |
| | CCAGACCACCCAGAAAGGCC | |
| | AGAAAAACAGCCGCGAACGC | |
| | ATGAAACGCATTGAAGAAGG | |
| | CATTAAAGAACTGGGCAGCC | |
| | AGATTCTGAAAGAACATCCG | |
| | GTGGAAAACACCCAGCTGCA | |
| | GAACGAAAAACTGTATCTGT | |
| | ATTATCTGCAGAACGGCCGC | |
| | GATATGTATGTGGATCAGGA | |
| | ACTGGATATTAACCGCCTGA | |
| | GCGATTATGATGTGGATCAT | |
| | ATTGTGCCGCAGAGCTTTCT | |
| | GAAAGATGATAGCATTGATA | |
| | ACAAAGTGCTGACCCGCAGC | |
| | GATAAAAACCGCGGCAAAAG | |
| | CGATAACGTGCCGAGCGAAG | |
| | AAGTGGTGAAAAAAATGAAA | |
| | AACTATTGGCGCCAGCTGCT | |
| | GAACGCGAAACTGATTACCC | |
| | AGCGCAAATTTGATAACCTG | |
| | ACCAAAGCGGAACGCGGCGG | |
| | CCTGAGCGAACTGGATAAAG | |
| | CGGGCTTTATTAAACGCCAG | |
| | CTGGTGGAAACCCGCCAGAT | |
| | TACCAAACATGTGGCGCAGA | |
| | TTCTGGATAGCCGCATGAAC | |
| | ACCAAATATGATGAAAACGA | |
| | TAAACTGATTCGCGAAGTGA | |
| | AAGTGATTACCCTGAAAAGC | |
| | AAACTGGTGAGCGATTTTCG | |
| | CAAAGATTTTCAGTTTTATA | |
| | AAGTGCGCGAAATTAACAAC | |
| | TATCATCATGCGCATGATGC | |
| | GTATCTGAACGCGGTGGTGG | |
| | GCACCGCGCTGATTAAAAAA | |
| | TATCCGAAACTGGAAAGCGA | |
| | ATTTGTGTATGGCGATTATA | |
| | AAGTGTATGATGTGCGCAAA | |
| | ATGATTGCGAAAAGCGAACA | |
| | GGAAATTGGCAAAGCGACCG | |
| | CGAAATATTTTTTTTATAGC | |
| | AACATTATGAACTTTTTTAA | |
| | AACCGAAATTACCCTGGCGA | |
| | ACGGCGAAATTCGCAAACGC | |
| | CCGCTGATTGAAACCAACGG | |
| | CGAAACCGGCGAAATTGTGT | |
| | GGGATAAAGGCCGCGATTTT | |
| | GCGACCGTGCGCAAAGTGCT | |
| | GAGCATGCCGCAGGTGAACA | |
| | TTGTGAAAAAAACCGAAGTG | |
| | CAGACCGGCGGCTTTAGCAA | |
| | AGAAAGCATTCTGCCGAAAC | |
| | GCAACAGCGATAAACTGATT | |
| | GCGCGCAAAAAAGATTGGGA | |
| | TCCGAAAAAATATGGCGGCT | |
| | TTGATAGCCCGACCGTGGCG | |
| | TATAGCGTGCTGGTGGTGGC | |
| | GAAAGTGGAAAAAGGCAAAA | |
| | GCAAAAAACTGAAAAGCGTG | |
| | AAAGAACTGCTGGGCATTAC | |
| | CATTATGGAACGCAGCAGCT | |
| | TTGAAAAAAACCCGATTGAT | |
| | TTTCTGGAAGCGAAAGGCTA | |
| | TAAAGAAGTGAAAAAAGATC | |
| | TGATTATTAAACTGCCGAAA | |
| | TATAGCCTGTTTGAACTGGA | |
| | AAACGGCCGCAAACGCATGC | |
| | TGGCGAGCGCGGGCGAACTG | |
| | CAGAAAGGCAACGAACTGGC | |
| | GCTGCCGAGCAAATATGTGA | |
| | ACTTTCTGTATCTGGCGAGC | |
| | CATTATGAAAAACTGAAAGG | |
| | CAGCCCGGAAGATAACGAAC | |
| | AGAAACAGCTGTTTGTGGAA | |
| | CAGCATAAACATTATCTGGA | |
| | TGAAATTATTGAACAGATTA | |
| | GCGAATTTAGCAAACGCGTG | |
| | ATTCTGGCGGATGCGAACCT | |
| | GGATAAAGTGCTGAGCGCGT | |
| | ATAACAAACATCGCGATAAA | |
| | CCGATTCGCGAACAGGCGGA | |
| | AAACATTATTCATCTGTTTA | |
| | CCCTGACCAACCTGGGCGCG | |
| | CCGGCGGCGTTTAAATATTT | |
| | TGATACCACCATTGATCGCA | |
| | AACGCTATACCAGCACCAAA | |
| | GAAGTGCTGGATGCGACCCT | |
| | GATTCATCAGAGCATTACCG | |
| | GCCTGTATGA | |
| | AACCCGCATTGATCTGAGCC | |
| | AGCTGGGCGGCGAT | |

[0183] The base editors described herein may include canonical SpCas9, or any variant thereof having at least 80%, at least 85%, at least 90%, at least 95%, or at least 99% sequence identity with a wild type Cas9 sequence provided above. These variants may include SpCas9 variants containing one or more mutations, including any known mutation reported with the SwissProt Accession No. Q99ZW2 entry, which include:

| SpCas9 mutation | |
|---|---|
| (relative to the | |
| amino acid sequence | |
| of the canonical | Function/Characteristic (as reported) (see |
| SpCas9 sequence, | UniProtKB—Q99ZW2 (CAS9_STRPT1) entry— |
| SEQ ID NO: 213) | incorporated herein by reference) |
| D10A | Nickase mutant which cleaves the protospacer |
| | strand (but no cleavage of non-protospacer |
| | strand) |
| S15A | Decreased DNA cleavage activity |
| R66A | Decreased DNA cleavage activity |
| R70A | No DNA cleavage |
| R74A | Decreased DNA cleavage |
| R78A | Decreased DNA cleavage |
| 97-150 deletion | No nuclease activity |
| R165A | Decreased DNA cleavage |
| 175-307 deletion | About 50% decreased DNA cleavage |
| 312-409 deletion | No nuclease activity |
| E762A | Nickase |
| H840A | Nickase mutant which cleaves the non- |
| | protospacer strand but does not cleave the |
| | protospacer strand |
| N854A | Nickase |
| N8 63A | Nickase |
| H982A | Decreased DNA cleavage |
| D986A | Nickase |
| 1099-1368 deletion | No nuclease activity |
| R1333A | Reduced DNA binding |

[0184] Other wild type SpCas9 sequences that may be used in the present disclosure, include:

| | | SEQ |
|---|---|---|
| | | ID |
| Description | Sequence | NO: |
| SpCas9 | ATGGATAAGAAATACTCAAT | SEQ |
| Streptococcus | AGGCTTAGATATCGGCACAA | ID |
| pyogenes | ATAGCGTCGGATGGGCGGTG | NO: |
| MGAS1882 wild | ATCACTGATGATTATAAGGT | 2 |
| type | TCCGTCTAAAAAGTTCAAGG | |
| NC_017053.1 | TTCTGGGAAATACAGACCGC | |
| | CACAGTATCAAAAAAAATCT | |
| | TATAGGGGCTCTTTTATTTG | |
| | GCAGTGGAGAGACAGCGGAA | |
| | GCGACTCGTCTCAAACGGAC | |
| | AGCTCGTAGAAGGTATACAC | |
| | GTCGGAAGAATCGTATTTGT | |
| | TATCTACAGGAGATTTTTTC | |
| | AAATGAGATGGCGAAAGTAG | |
| | ATGATAGTTTCTTTCATCGA | |
| | CTTGAAGAGTCTTTTTTGGT | |
| | GGAAGAAGACAAGAAGCATG | |
| | AACGTCATCCTATTTTTGGA | |
| | AATATAGTAGATGAAGTTGC | |
| | TTATCATGAGAAATATCCAA | |
| | CTATCTATCATCTGCGAAAA | |
| | AAATTGGCAGATTCTACTGA | |
| | TAAAGCGGATTTGCGCTTAA | |
| | TCTATTTGGCCTTAGCGCAT | |
| | ATGATTAAGTTTCGTGGTCA | |
| | TTTTTTGATTGAGGGAGATT | |
| | TAAATCCTGATAATAGTGAT | |
| | GTGGACAAACTATTTATCCA | |
| | GTTGGTACAAATCTACAATC | |
| | AATTATTTGAAGAAAACCCT | |
| | ATTAACGCAAGTAGAGTAGA | |
| | TGCTAAAGCGATTCTTTCTG | |
| | CACGATTGAGTAAATCAAGA | |
| | CGATTAGAAAATCTCATTGC | |
| | TCAGCTCCCCGGTGAGAAGA | |
| | GAAATGGCTTGTTTGGGAAT | |
| | CTCATTGCTTTGTCATTGGG | |
| | ATTGACCCCTAATTTTAAAT | |
| | CAAATTTTGATTTGGCAGAA | |
| | GATGCTAAATTACAGCTTTC | |
| | AAAAGATACTTACGATGATG | |
| | ATTTAGATAATTTATTGGCG | |
| | CAAATTGGAGATCAATATGC | |
| | TGATTTGTTTTTGGCAGCTA | |
| | AGAATTTATCAGATGCTATT | |
| | TTACTTTCAGATATCCTAAG | |
| | AGTAAATAGTGAAATAACTA | |
| | AGGCTCCCCTATCAGCTTCA | |
| | ATGATTAAGCGCTACGATGA | |
| | ACATCATCAAGACTTGACTC | |
| | TTTTAAAAGCTTTAGTTCGA | |
| | CAACAACTTCCAGAAAAGTA | |
| | TAAAGAAATCTTTTTTGATC | |
| | AATCAAAAAACGGATATGCA | |
| | GGTTATATTGATGGGGGAGO | |
| | TAGOCAAGAAGAATTTTATA | |
| | AATTTATCAAACCAATTTTA | |
| | GAAAAAATGGATGGTACTGA | |
| | GGAATTATTGGTGAAACTAA | |
| | ATCGTGAAGATTTGCTGCGC | |
| | AAGCAACGGACCTTTGACAA | |
| | CGGCTCTATTCCCCATCAAA | |
| | TTCACTTGGGTGAGCTGCAT | |
| | GCTATTTTGAGAAGACAAGA | |
| | AGACTTTTATCCATTTTTAA | |
| | AAGACAATCGTGAGAAGATT | |
| | GAAAAAATCTTGACTTTTCG | |
| | AATTCCTTATTATGTTGGTC | |
| | CATTGGCGCGTGGCAATAGT | |
| | CGTTTTGCATGGATGACTCG | |
| | GAAGTCTGAAGAAACAATTA | |
| | CCCCATGGAATTTTGAAGAA | |
| | GTTGTCGATAAAGGTGCTTC | |
| | AGCTCAATCATTTATTGAAC | |
| | GCATGACAAACTTTGATAAA | |
| | AATCTTCCAAATGAAAAAGT | |
| | ACTACCAAAACATAGTTTGC | |
| | TTTATGAGTATTTTACGGTT | |
| | TATAACGAATTGACAAAGGT | |
| | CAAATATGTTACTGAGGGAA | |
| | TGCGAAAACCAGCATTTCTT | |
| | TCAGGTGAACAGAAGAAAGC | |
| | CATTGTTGATTTACTCTTCA | |
| | AAACAAATCGAAAAGTAACC | |
| | GTTAAGCAATTAAAAGAAGA | |
| | TTATTTCAAAAAAATAGAAT | |
| | GTTTTGATAGTGTTGAAATT | |
| | TCAGGAGTTGAAGATAGATT | |
| | TAATGCTTCATTAGGCGCCT | |
| | ACCATGATTTGCTAAAAATT | |
| | ATTAAAGATAAAGATTTTTT | |
| | GGATAATGAAGAAAATGAAG | |
| | ATATCTTAGAGGATATTGTT | |
| | TTAACATTGACCTTATTTGA | |
| | AGATAGGGGGATGATTGAGG | |
| | AAAGACTTAAAACATATGCT | |
| | CACCTCTTTGATGATAAGGT | |
| | GATGAAACAGCTTAAACGTC | |
| | GCCGTTATACTGGTTGGGGA | |
| | CGTTTGTCTCGAAAATTGAT | |
| | TAATGGTATTAGGGATAAGC | |
| | AATCTGGCAAAACAATATTA | |
| | GATTTTTTGAAATCAGATGG | |
| | TTTTGCCAATCGCAATTTTA | |
| | TGCAGCTGATCCATGATGAT | |
| | AGTTTGACATTTAAAGAAGA | |
| | TATTCAAAAAGCACAGGTGT | |
| | CTGGACAAGGCCATAGTTTA | |
| | CATGAACAGATTGCTAACTT | |
| | AGCTGGCAGTCCTGCTATTA | |
| | AAAAAGGTATTTTACAGACT | |
| | GTAAAAATTGTTGATGAACT | |
| | GGTCAAAGTAATGGGGCATA | |
| | AGCCAGAAAATATCGTTATT | |
| | GAAATGGCACGTGAAAATCA | |
| | GACAACTCAAAAGGGCCAGA | |
| | AAAATTCGCGAGAGCGTATG | |
| | AAACGAATCGAAGAAGGTAT | |
| | CAAAGAATTAGGAAGTCAGA | |
| | TTCTTAAAGAGCATCCTGTT | |
| | GAAAATACTCAATTGCAAAA | |
| | TGAAAAGCTCTATCTCTATT | |
| | ATCTACAAAATGGAAGAGAC | |
| | ATGTATGTGGACCAAGAATT | |
| | AGATATTAATCGTTTAAGTG | |
| | ATTATGATGTCGATCACATT | |
| | GTTCCACAAAGTTTCATTAA | |
| | AGACGATTCAATAGACAATA | |
| | AGGTACTAACGCGTTCTGAT | |
| | AAAAATCGTGGTAAATCGGA | |
| | TAACGTTCCAAGTGAAGAAG | |
| | TAGTCAAAAAGATGAAAAAC | |
| | TATTGGAGACAACTTCTAAA | |
| | CGCCAAGTTAATCACTCAAC | |
| | GTAAGTTTGATAATTTAACG | |
| | AAAGCTGAACGTGGAGGTTT | |
| | GAGTGAACTTGATAAAGCTG | |
| | GTTTTATCAAACGCCAATTG | |
| | GTTGAAACTCGCCAAATCAC | |
| | TAAGCATGTGGCACAAATTT | |
| | TGGATAGTCGCATGAATACT | |
| | AAATACGATGAAAATGATAA | |
| | ACTTATTCGAGAGGTTAAAG | |
| | TGATTACCTTAAAATCTAAA | |
| | TTAGTTTCTGACTTCCGAAA | |
| | AGATTTCCAATTCTATAAAG | |
| | TACGTGAGATTAACAATTAC | |
| | CATCATGCCCATGATGCGTA | |
| | TCTAAATGCCGTCGTTGGAA | |
| | CTGCTTTGATTAAGAAATAT | |
| | CCAAAACTTGAATCGGAGTT | |
| | TGTCTATGGTGATTATAAAG | |
| | TTTATGATGTTCGTAAAATG | |
| | ATTGCTAAGTCTGAGCAAGA | |
| | AATAGGCAAAGCAACCGCAA | |
| | AATATTTCTTTTACTCTAAT | |
| | ATCATGAACTTCTTCAAAAC | |
| | AGAAATTACACTTGCAAATG | |
| | GAGAGATTCGCAAACGCCCT | |
| | CTAATCGAAACTAATGGGGA | |
| | AACTGGAGAAATTGTCTGGG | |
| | ATAAAGGGCGAGATTTTGCC | |
| | ACAGTGCGCAAAGTATTGTC | |
| | CATGCCCCAAGTCAATATTG | |
| | TCAAGAAAACAGAAGTACAG | |
| | ACAGGCGGATTCTCCAAGGA | |
| | GTCAATTTTACCAAAAAGAA | |
| | ATTCGGACAAGCTTATTGCT | |
| | CGTAAAAAAGACTGGGATCC | |
| | AAAAAAATATGGTGGTTTTG | |
| | ATAGTCCAACGGTAGCTTAT | |
| | TCAGTCCTAGTGGTTGCTAA | |
| | GGTGGAAAAAGGGAAATCGA | |
| | AGAAGTTAAAATCCGTTAAA | |
| | GAGTTACTAGGGATCACAAT | |
| | TATGGAAAGAAGTTCCTTTG | |
| | AAAAAAATCCGATTGACTTT | |
| | TTAGAAGCTAAAGGATATAA | |
| | GGAAGTTAAAAAAGACTTAA | |
| | TCATTAAACTACCTAAATAT | |
| | AGTCTTTTTGAGTTAGAAAA | |
| | CGGTCGTAAACGGATGCTGG | |
| | CTAGTGCCGGAGAATTACAA | |
| | AAAGGAAATGAGCTGGCTCT | |
| | GCCAAGCAAATATGTGAATT | |
| | TTTTATATTTAGCTAGTCAT | |
| | TATGAAAAGTTGAAGGGTAG | |
| | TCCAGAAGATAACGAACAAA | |
| | AACAATTGTTTGTGGAGCAG | |
| | CATAAGCATTATTTAGATGA | |
| | GATTATTGAGCAAATCAGTG | |
| | AATTTTCTAAGCGTGTTATT | |
| | TTAGCAGATGCCAATTTAGA | |
| | TAAAGTTCTTAGTGCATATA | |
| | ACAAACATAGAGACAAACCA | |
| | ATACGTGAACAAGCAGAAAA | |
| | TATTATTCATTTATTTACGT | |
| | TGACGAATCTTGGAGCTCCC | |
| | GCTGCTTTTAAATATTTTGA | |
| | TACAACAATTGATCGTAAAC | |
| | GATATACGTCTACAAAAGAA | |
| | GTTTTAGATGCCACTCTTAT | |
| | CCATCAATCCATCACTGGTC | |
| | TTTATGAAACACGCATTGAT | |
| | TTGAGTCAGCTAGGAGGTGA | |
| | CTGA | |
| SpCas9 | MDKKYSIGLDIGTNSVGWAV | SEQ |
| Streptococcus | ITDDYKVPSKKFKVLGNTDR | ID |
| pyogenes | HSIKKNLIGALLFGSGETAE | NO: |
| MGAS1882 wild | ATRLKRTARRRYTRRKNRIC | 3 |
| type | YLQEIFSNEMAKVDDSFFHR | |
| NC_017053.1 | LEESFLVEEDKKHERHPIFG | |
| | NIVDEVAYHEKYPTIYHLRK | |
| | KLADSTDKADLRLIYLALAH | |
| | MIKFRGHFLIEGDLNPDNSD | |
| | VDKLFIQLVQIYNQLFEENP | |
| | INASRVDAKAILSARLSKSR | |
| | RLENLIAQLPGEKRNGLFGN | |
| | LIALSLGLTPNFKSNFDLAE | |
| | DAKLQLSKDTYDDDLDNLLA | |
| | QIGDQYADLFLAAKNLSDAI | |
| | LLSDILRVNSEITKAPLSAS | |
| | MIKRYDEHHQDLTLLKALVR | |
| | QQLPEKYKEIFFDQSKNGYA | |
| | GYIDGGASQEEFYKFIKPIL | |
| | EKMDGTEELLVKLNREDLLR | |
| | KQRTFDNGSIPHQIHLGELH | |
| | AILRRQEDFYPFLKDNREKI | |
| | EKILTFRIPYYVGPLARGNS | |
| | RFAWMTRKSEETITPWNFEE | |
| | VVDKGASAQSFIERMTNFDK | |
| | NLPNEKVLPKHSLLYEYFTV | |
| | YNELTKVKYVTEGMRKPAFL | |
| | SGEQKKAIVDLLFKTNRKVT | |
| | VKQLKEDYFKKIECFDSVEI | |
| | SGVEDRFNASLGAYHDLLKI | |
| | IKDKDFLDNEENEDILEDIV | |
| | LTLTLFEDRGMIEERLKTYA | |
| | HLFDDKVMKQLKRRRYTGWG | |
| | RLSRKLINGIRDKQSGKTIL | |
| | DFLKSDGFANRNFMQLIHDD | |
| | SLTFKEDIQKAQVSGQGHSL | |
| | HEQIANLAGSPAIKKGILQT | |
| | VKIVDELVKVMGHKPENIVI | |
| | EMARENQTTQKGQKNSRERM | |
| | KRIEEGIKELGSQILKEHPV | |
| | ENTQLQNEKLYLYYLQNGRD | |
| | MYVDQELDINRLSDYDVDHI | |
| | VPQSFIKDDSIDNKVLTRSD | |
| | KNRGKSDNVPSEEVVKKMKN | |
| | YWRQLLNAKLITQRKFDNLT | |
| | KAERGGLSELDKAGFIKRQL | |
| | VETRQITKHVAQILDSRMNT | |
| | KYDENDKLIREVKVITLKSK | |
| | LVSDFRKDFQFYKVREINNY | |
| | HHAHDAYLNAVVGTALIKKY | |
| | PKLESEFVYGDYKVYDVRKM | |
| | IAKSEQEIGKATAKYFFYSN | |
| | IMNFFKTEITLANGEIRKRP | |
| | LIETNGETGEIVWDKGRDFA | |
| | TVRKVLSMPQVNIVKKTEVQ | |
| | TGGFSKESILPKRNSDKLIA | |
| | RKKDWDPKKYGGFDSPTVAY | |
| | SVLVVAKVEKGKSKKLKSVK | |
| | ELLGITIMERSSFEKNPIDF | |
| | LEAKGYKEVKKDLIIKLPKY | |
| | SLFELENGRKRMLASAGELQ | |
| | KGNELALPSKYVNFLYLASH | |
| | YEKLKGSPEDNEQKQLFVEQ | |
| | HKHYLDEIIEQISEFSKRVI | |
| | LADANLDKVLSAYNKHRDKP | |
| | IREQAENIIHLFTLTNLGAP | |
| | AAFKYFDTTIDRKRYTSTKE | |
| | VLDATLIHQSITGLYETRID | |
| | LSQLGGD | |
| SpCas9 | ATGGATAAAAAGTATTCTAT | SEQ |
| Streptococcus | TGGTTTAGACATCGGCACTA | ID |
| pyogenes wild | ATTCCGTTGGATGGGCTGTC | NO: |
| type | ATAACCGATGAATACAAAGT | 4 |
| SWBC2D7W014 | ACCTTCAAAGAAATTTAAGG | |
| | TGTTGGGGAACACAGACCGT | |
| | CATTCGATTAAAAAGAATCT | |
| | TATCGGTGCCCTCCTATTCG | |
| | ATAGTGGCGAAACGGCAGAG | |
| | GCGACTCGCCTGAAACGAAC | |
| | CGCTCGGAGAAGGTATACAC | |
| | GTCGCAAGAACCGAATATGT | |
| | TACTTACAAGAAATTTTTAG | |
| | CAATGAGATGGCCAAAGTTG | |
| | ACGATTCTTTCTTTCACCGT | |
| | TTGGAAGAGTCCTTCCTTGT | |
| | CGAAGAGGACAAGAAACATG | |
| | AACGGCACCCCATCTTTGGA | |
| | AACATAGTAGATGAGGTGGC | |
| | ATATCATGAAAAGTACCCAA | |
| | CGATTTATCACCTCAGAAAA | |
| | AAGCTAGTTGACTCAACTGA | |
| | TAAAGCGGACCTGAGGTTAA | |
| | TCTACTTGGCTCTTGCCCAT | |
| | ATGATAAAGTTCCGTGGGCA | |
| | CTTTCTCATTGAGGGTGATC | |
| | TAAATCCGGACAACTCGGAT | |
| | GTCGACAAACTGTTCATCCA | |
| | GTTAGTACAAACCTATAATC | |
| | AGTTGTTTGAAGAGAACCCT | |
| | ATAAATGCAAGTGGCGTGGA | |
| | TGCGAAGGCTATTCTTAGCG | |
| | CCCGCCTCTCTAAATCCCGA | |
| | CGGCTAGAAAACCTGATCGC | |
| | ACAATTACCCGGAGAGAAGA | |
| | AAAATGGGTTGTTCGGTAAC | |
| | CTTATAGCGCTCTCACTAGG | |
| | CCTGACACCAAATTTTAAGT | |
| | CGAACTTCGACTTAGCTGAA | |
| | GATGCCAAATTGCAGCTTAG | |
| | TAAGGACACGTACGATGACG | |
| | ATCTCGACAATCTACTGGCA | |
| | CAAATTGGAGATCAGTATGC | |
| | GGACTTATTTTTGGCTGCCA | |
| | AAAACCTTAGCGATGCAATC | |
| | CTCCTATCTGACATACTGAG | |
| | AGTTAATACTGAGATTACCA | |
| | AGGCGCCGTTATCCGCTTCA | |
| | ATGATCAAAAGGTACGATGA | |
| | ACATCACCAAGACTTGACAC | |
| | TTCTCAAGGCCCTAGTCCGT | |
| | CAGCAACTGCCTGAGAAATA | |
| | TAAGGAAATATTCTTTGATC | |
| | AGTCGAAAAACGGGTACGCA | |
| | GGTTATATTGACGGCGGAGC | |
| | GAGTCAAGAGGAATTCTACA | |
| | AGTTTATCAAACCCATATTA | |
| | GAGAAGATGGATGGGACGGA | |
| | AGAGTTGCTTGTAAAACTCA | |
| | ATCGCGAAGATCTACTGCGA | |
| | AAGCAGCGGACTTTCGACAA | |
| | CGGTAGCATTCCACATCAAA | |
| | TCCACTTAGGCGAATTGCAT | |
| | GCTATACTTAGAAGGCAGGA | |
| | GGATTTTTATCCGTTCCTCA | |
| | AAGACAATCGTGAAAAGATT | |
| | GAGAAAATCCTAACCTTTCG | |
| | CATACCTTACTATGTGGGAC | |
| | CCCTGGCCCGAGGGAACTCT | |
| | CGGTTCGCATGGATGACAAG | |
| | AAAGTCCGAAGAAACGATTA | |
| | CTCCATGGAATTTTGAGGAA | |
| | GTTGTCGATAAAGGTGCGTC | |
| | AGCTCAATCGTTCATCGAGA | |
| | GGATGACCAACTTTGACAAG | |
| | AATTTACCGAACGAAAAAGT | |
| | ATTGCCTAAGCACAGTTTAC | |
| | TTTACGAGTATTTCACAGTG | |
| | TACAATGAACTCACGAAAGT | |
| | TAAGTATGTCACTGAGGGCA | |
| | TGCGTAAACCCGCCTTTCTA | |
| | AGCGGAGAACAGAAGAAAGC | |
| | AATAGTAGATCTGTTATTCA | |
| | AGACCAACCGCAAAGTGACA | |
| | GTTAAGCAATTGAAAGAGGA | |
| | CTACTTTAAGAAAATTGAAT | |
| | GCTTCGATTCTGTCGAGATC | |
| | TCCGGGGTAGAAGATCGATT | |
| | TAATGCGTCACTTGGTACGT | |
| | ATCATGACCTCCTAAAGATA | |
| | ATTAAAGATAAGGACTTCCT | |
| | GGATAACGAAGAGAATGAAG | |
| | ATATCTTAGAAGATATAGTG | |
| | TTGACTCTTACCCTCTTTGA | |
| | AGATCGGGAAATGATTGAGG | |
| | AAAGACTAAAAACATACGCT | |
| | CACCTGTTCGACGATAAGGT | |
| | TATGAAACAGTTAAAGAGGC | |
| | GTCGCTATACGGGCTGGGGA | |
| | CGATTGTCGCGGAAACTTAT | |
| | CAACGGGATAAGAGACAAGC | |
| | AAAGTGGTAAAACTATTCTC | |
| | GATTTTCTAAAGAGCGACGG | |
| | CTTCGCCAATAGGAACTTTA | |
| | TGCAGCTGATCCATGATGAC | |
| | TCTTTAACCTTCAAAGAGGA | |
| | TATACAAAAGGCACAGGTTT | |
| | CCGGACAAGGGGACTCATTG | |
| | CACGAACATATTGCGAATCT | |
| | TGCTGGTTCGCCAGCCATCA | |
| | AAAAGGGCATACTCCAGACA | |
| | GTCAAAGTAGTGGATGAGCT | |
| | AGTTAAGGTCATGGGACGTC | |
| | ACAAACCGGAAAACATTGTA | |
| | ATCGAGATGGCACGCGAAAA | |
| | TCAAACGACTCAGAAGGGGC | |
| | AAAAAAACAGTCGAGAGCGG | |
| | ATGAAGAGAATAGAAGAGGG | |
| | TATTAAAGAACTGGGCAGCC | |
| | AGATCTTAAAGGAGCATCCT | |
| | GTGGAAAATACCCAATTGCA | |
| | GAACGAGAAACTTTACCTCT | |
| | ATTACCTACAAAATGGAAGG | |
| | GACATGTATGTTGATCAGGA | |
| | ACTGGACATAAACCGTTTAT | |
| | CTGATTACGACGTCGATCAC | |
| | ATTGTACCCCAATCCTTTTT | |
| | GAAGGACGATTCAATCGACA | |
| | ATAAAGTGCTTACACGCTCG | |
| | GATAAGAACCGAGGGAAAAG | |
| | TGACAATGTTCCAAGCGAGG | |
| | AAGTCGTAAAGAAAATGAAG | |
| | AACTATTGGCGGCAGCTCCT | |
| | AAATGCGAAACTGATAACGC | |
| | AAAGAAAGTTCGATAACTTA | |
| | ACTAAAGCTGAGAGGGGTGG | |
| | CTTGTCTGAACTTGACAAGG | |
| | CCGGATTTATTAAACGTCAG | |
| | CTCGTGGAAACCCGCCAAAT | |
| | CACAAAGCATGTTGCACAGA | |
| | TACTAGATTCCCGAATGAAT | |
| | ACGAAATACGACGAGAACGA | |
| | TAAGCTGATTCGGGAAGTCA | |
| | AAGTAATCACTTTAAAGTCA | |
| | AAATTGGTGTCGGACTTCAG | |
| | AAAGGATTTTCAATTCTATA | |
| | AAGTTAGGGAGATAAATAAC | |
| | TACCACCATGCGCACGACGC | |
| | TTATCTTAATGCCGTCGTAG | |
| | GGACCGCACTCATTAAGAAA | |
| | TACCCGAAGCTAGAAAGTGA | |
| | GTTTGTGTATGGTGATTACA | |
| | AAGTTTATGACGTCCGTAAG | |
| | ATGATCGCGAAAAGCGAACA | |
| | GGAGATAGGCAAGGCTACAG | |
| | CCAAATACTTCTTTTATTCT | |
| | AACATTATGAATTTCTTTAA | |
| | GACGGAAATCACTCTGGCAA | |
| | ACGGAGAGATACGCAAACGA | |
| | CCTTTAATTGAAACCAATGG | |
| | GGAGACAGGTGAAATCGTAT | |
| | GGGATAAGGGCCGGGACTTC | |
| | GCGACGGTGAGAAAAGTTTT | |
| | GTCCATGCCCCAAGTCAACA | |
| | TAGTAAAGAAAACTGAGGTG | |
| | CAGACCGGAGGGTTTTCAAA | |
| | GGAATCGATTCTTCCAAAAA | |
| | GGAATAGTGATAAGCTCATC | |
| | GCTCGTAAAAAGGACTGGGA | |
| | CCCGAAAAAGTACGGTGGCT | |
| | TCGATAGCCCTACAGTTGCC | |
| | TATTCTGTCCTAGTAGTGGC | |
| | AAAAGTTGAGAAGGGAAAAT | |
| | CCAAGAAACTGAAGTCAGTC | |
| | AAAGAATTATTGGGGATAAC | |
| | GATTATGGAGCGCTCGTCTT | |
| | TTGAAAAGAACCCCATCGAC | |
| | TTCCTTGAGGCGAAAGGTTA | |
| | CAAGGAAGTAAAAAAGGATC | |
| | TCATAATTAAACTACCAAAG | |
| | TATAGTCTGTTTGAGTTAGA | |
| | AAATGGCCGAAAACGGATGT | |
| | TGGCTAGCGCCGGAGAGCTT | |
| | CAAAAGGGGAACGAACTCGC | |
| | ACTACCGTCTAAATACGTGA | |
| | ATTTCCTGTATTTAGCGTCC | |
| | CATTACGAGAAGTTGAAAGG | |
| | TTCACCTGAAGATAACGAAC | |
| | AGAAGCAACTTTTTGTTGAG | |
| | CAGCACAAACATTATCTCGA | |
| | CGAAATCATAGAGCAAATTT | |
| | CGGAATTCAGTAAGAGAGTC | |
| | ATCCTAGCTGATGCCAATCT | |
| | GGACAAAGTATTAAGCGCAT | |
| | ACAACAAGCACAGGGATAAA | |
| | CCCATACGTGAGCAGGCGGA | |
| | AAATATTATCCATTTGTTTA | |
| | CTCTTACCAACCTCGGCGCT | |
| | CCAGCCGCATTCAAGTATTT | |
| | TGACACAACGATAGATCGCA | |
| | AACGATACACTTCTACCAAG | |
| | GAGGTGCTAGACGCGACACT | |
| | GATTCACCAATCCATCACGG | |
| | GATTATATGAAACTCGGATA | |
| | GATTTGTCACAGCTTGGGGG | |
| | TGACGGATCCCCCAAGAAGA | |
| | AGAGGAAAGTCTCGAGCGAC | |
| | TACAAAGACCATGACGGTGA | |
| | TTATAAAGATCATGACATCG | |
| | ATTACAAGGATGACGATGAC | |
| | AAGGCTGCAGGA | |
| SpCas9 | MDKKYSIGLDIGTNSVGWAV | SEQ |
| Streptococcus | ITDEYKVPSKKFKVLGNTDR | ID |
| pyogenes wild | HSIKKNLIGALLFDSGETAE | NO: |
| type | ATRLKRTARRRYTRRKNRIC | 5 |
| Encoded | YLQEIFSNEMAKVDDSFFHR | |
| product of | LEESFLVEEDKKHERHPIFG | |
| SWBC2D7WO14 | NIVDEVAYHEKYPTIYHLRK | |
| | KLVDSTDKADLRLIYLALAH | |
| | MIKFRGHFLIEGDLNPDNSD | |
| | VDKLFIQLVQTYNQLFEENP | |
| | INASGVDAKAILSARLSKSR | |
| | RLENLIAQLPGEKKNGLFGN | |
| | LIALSLGLTPNFKSNFDLAE | |
| | DAKLQLSKDTYDDDLDNLLA | |
| | QIGDQYADLFLAAKNLSDAI | |
| | LLSDILRVNTEITKAPLSAS | |
| | MIKRYDEHHQDLTLLKALVR | |
| | QQLPEKYKEIFFDQSKNGYA | |
| | GYIDGGASQEEFYKFIKPIL | |
| | EKMDGTEELLVKLNREDLLR | |
| | KQRTFDNGSIPHQIHLGELH | |
| | AILRRQEDFYPFLKDNREKI | |
| | EKILTFRIPYYVGPLARGNS | |
| | RFAWMTRKSEETITPWNFEE | |
| | VVDKGASAQSFIERMTNFDK | |
| | NLPNEKVLPKHSLLYEYFTV | |
| | YNELTKVKYVTEGMRKPAFL | |
| | SGEQKKAIVDLLFKTNRKVT | |
| | VKQLKEDYFKKIECFDSVEI | |
| | SGVEDRFNASLGTYHDLLKI | |
| | IKDKDFLDNEENEDILEDIV | |
| | LTLTLFEDREMIEERLKTYA | |
| | HLFDDKVMKQLKRRRYTGWG | |
| | RLSRKLINGIRDKQSGKTIL | |
| | DFLKSDGFANRNFMQLIHDD | |
| | SLTFKEDIQKAQVSGQGDSL | |
| | HEHIANLAGSPAIKKGILQT | |
| | VKVVDELVKVMGRHKPENIV | |
| | IEMARENQTTQKGQKNSRER | |
| | MKRIEEGIKELGSQILKEHP | |
| | VENTQLQNEKLYLYYLQNGR | |
| | DMYVDQELDINRLSDYDVDH | |
| | IVPQSFLKDDSIDNKVLTRS | |
| | DKNRGKSDNVPSEEVVKKMK | |
| | NYWRQLLNAKLITQRKFDNL | |
| | TKAERGGLSELDKAGFIKRQ | |
| | LVETRQITKHVAQILDSRMN | |
| | TKYDENDKLIREVKVITLKS | |
| | KLVSDFRKDFQFYKVREINN | |
| | YHHAHDAYLNAVVGTALIKK | |
| | YPKLESEFVYGDYKVYDVRK | |
| | MIAKSEQEIGKATAKYFFYS | |
| | NIMNFFKTEITLANGEIRKR | |
| | PLIETNGETGEIVWDKGRDF | |
| | ATVRKVLSMPQVNIVKKTEV | |
| | QTGGFSKESILPKRNSDKLI | |
| | ARKKDWDPKKYGGFDSPTVA | |
| | YSVLVVAKVEKGKSKKLKSV | |
| | KELLGITIMERSSFEKNPID | |
| | FLEAKGYKEVKKDLIIKLPK | |
| | YSLFELENGRKRMLASAGEL | |
| | QKGNELALPSKYVNFLYLAS | |
| | HYEKLKGSPEDNEQKQLFVE | |
| | QHKHYLDEIIEQISEFSKRV | |
| | ILADANLDKVLSAYNKHRDK | |
| | PIREQAENIIHLFTLTNLGA | |
| | PAAFKYFDTTIDRKRYTSTK | |
| | EVLDATLIHQSITGLYETRI | |
| | DLSQLGGDGSPKKKRKVSSD | |
| | YKDHDGDYKDHDIDYKDDDD | |
| | KAAG | |
| SpCas9 | ATGGATAAGAAATACTCAAT | SEQ |
| Streptococcus | AGGCTTAGATATCGGCACAA | ID |
| pyogenes | ATAGCGTCGGATGGGCGGTG | NO: |
| M1GAS wild | ATCACTGATGAATATAAGGT | 6 |
| type | TCCGTCTAAAAAGTTCAAGG | |
| NC_002737.2 | TTCTGGGAAATACAGACCGC | |
| | CACAGTATCAAAAAAAATCT | |
| | TATAGGGGCTCTTTTATTTG | |
| | ACAGTGGAGAGACAGCGGAA | |
| | GCGACTCGTCTCAAACGGAC | |
| | AGCTCGTAGAAGGTATACAC | |
| | GTCGGAAGAATCGTATTTGT | |
| | TATCTACAGGAGATTTTTTC | |
| | AAATGAGATGGCGAAAGTAG | |
| | ATGATAGTTTCTTTCATCGA | |
| | CTTGAAGAGTCTTTTTTGGT | |
| | GGAAGAAGACAAGAAGCATG | |
| | AACGTCATCCTATTTTTGGA | |
| | AATATAGTAGATGAAGTTGC | |
| | TTATCATGAGAAATATCCAA | |
| | CTATCTATCATCTGCGAAAA | |
| | AAATTGGTAGATTCTACTGA | |
| | TAAAGCGGATTTGCGCTTAA | |
| | TCTATTTGGCCTTAGCGCAT | |
| | ATGATTAAGTTTCGTGGTCA | |
| | TTTTTTGATTGAGGGAGATT | |
| | TAAATCCTGATAATAGTGAT | |
| | GTGGACAAACTATTTATCCA | |
| | GTTGGTACAAACCTACAATC | |
| | AATTATTTGAAGAAAACCCT | |
| | ATTAACGCAAGTGGAGTAGA | |
| | TGCTAAAGCGATTCTTTCTG | |
| | CACGATTGAGTAAATCAAGA | |
| | CGATTAGAAAATCTCATTGC | |
| | TCAGCTCCCCGGTGAGAAGA | |
| | AAAATGGCTTATTTGGGAAT | |
| | CTCATTGCTTTGTCATTGGG | |
| | TTTGACCCCTAATTTTAAAT | |
| | CAAATTTTGATTTGGCAGAA | |
| | GATGCTAAATTACAGCTTTC | |
| | AAAAGATACTTACGATGATG | |
| | ATTTAGATAATTTATTGGCG | |
| | CAAATTGGAGATCAATATGC | |
| | TGATTTGTTTTTGGCAGCTA | |
| | AGAATTTATCAGATGCTATT | |
| | TTACTTTCAGATATCCTAAG | |
| | AGTAAATACTGAAATAACTA | |
| | AGGCTCCCCTATCAGCTTCA | |
| | ATGATTAAACGCTACGATGA | |
| | ACATCATCAAGACTTGACTC | |
| | TTTTAAAAGCTTTAGTTCGA | |
| | CAACAACTTCCAGAAAAGTA | |
| | TAAAGAAATCTTTTTTGATC | |
| | AATCAAAAAACGGATATGCA | |
| | GGTTATATTGATGGGGGAGO | |
| | TAGOCAAGAAGAATTTTATA | |
| | AATTTATCAAACCAATTTTA | |
| | GAAAAAATGGATGGTACTGA | |
| | GGAATTATTGGTGAAACTAA | |
| | ATCGTGAAGATTTGCTGCGC | |
| | AAGCAACGGACCTTTGACAA | |
| | CGGCTCTATTCCCCATCAAA | |
| | TTCACTTGGGTGAGCTGCAT | |
| | GCTATTTTGAGAAGACAAGA | |
| | AGACTTTTATCCATTTTTAA | |
| | AAGACAATCGTGAGAAGATT | |
| | GAAAAAATCTTGACTTTTCG | |
| | AATTCCTTATTATGTTGGTC | |
| | CATTGGCGCGTGGCAATAGT | |
| | CGTTTTGCATGGATGACTCG | |
| | GAAGTCTGAAGAAACAATTA | |
| | CCCCATGGAATTTTGAAGAA | |
| | GTTGTCGATAAAGGTGCTTC | |
| | AGCTCAATCATTTATTGAAC | |
| | GCATGACAAACTTTGATAAA | |
| | AATCTTCCAAATGAAAAAGT | |
| | ACTACCAAAACATAGTTTGC | |
| | TTTATGAGTATTTTACGGTT | |
| | TATAACGAATTGACAAAGGT | |
| | CAAATATGTTACTGAAGGAA | |
| | TGCGAAAACCAGCATTTCTT | |
| | TCAGGTGAACAGAAGAAAGC | |
| | CATTGTTGATTTACTCTTCA | |
| | AAACAAATCGAAAAGTAACC | |
| | GTTAAGCAATTAAAAGAAGA | |
| | TTATTTCAAAAAAATAGAAT | |
| | GTTTTGATAGTGTTGAAATT | |
| | TCAGGAGTTGAAGATAGATT | |
| | TAATGCTTCATTAGGTACCT | |
| | ACCATGATTTGCTAAAAATT | |
| | ATTAAAGATAAAGATTTTTT | |
| | GGATAATGAAGAAAATGAAG | |
| | ATATCTTAGAGGATATTGTT | |
| | TTAACATTGACCTTATTTGA | |
| | AGATAGGGAGATGATTGAGG | |
| | AAAGACTTAAAACATATGCT | |
| | CACCTCTTTGATGATAAGGT | |
| | GATGAAACAGCTTAAACGTC | |
| | GCCGTTATACTGGTTGGGGA | |
| | CGTTTGTCTCGAAAATTGAT | |
| | TAATGGTATTAGGGATAAGC | |
| | AATCTGGCAAAACAATATTA | |
| | GATTTTTTGAAATCAGATGG | |
| | TTTTGCCAATCGCAATTTTA | |
| | TGCAGCTGATCCATGATGAT | |
| | AGTTTGACATTTAAAGAAGA | |
| | CATTCAAAAAGCACAAGTGT | |
| | CTGGACAAGGCGATAGTTTA | |
| | CATGAACATATTGCAAATTT | |
| | AGCTGGTAGCCCTGCTATTA | |
| | AAAAAGGTATTTTACAGACT | |
| | GTAAAAGTTGTTGATGAATT | |
| | GGTCAAAGTAATGGGGCGGC | |
| | ATAAGCCAGAAAATATCGTT | |
| | ATTGAAATGGCACGTGAAAA | |
| | TCAGACAACTCAAAAGGGCC | |
| | AGAAAAATTCGCGAGAGCGT | |
| | ATGAAACGAATCGAAGAAGG | |
| | TATCAAAGAATTAGGAAGTC | |
| | AGATTCTTAAAGAGCATCCT | |
| | GTTGAAAATACTCAATTGCA | |
| | AAATGAAAAGCTCTATCTCT | |
| | ATTATCTCCAAAATGGAAGA | |
| | GACATGTATGTGGACCAAGA | |
| | ATTAGATATTAATCGTTTAA | |
| | GTGATTATGATGTCGATCAC | |
| | ATTGTTCCACAAAGTTTCCT | |
| | TAAAGACGATTCAATAGACA | |
| | ATAAGGTCTTAACGCGTTCT | |
| | GATAAAAATCGTGGTAAATC | |
| | GGATAACGTTCCAAGTGAAG | |
| | AAGTAGTCAAAAAGATGAAA | |
| | AACTATTGGAGACAACTTCT | |
| | AAACGCCAAGTTAATCACTC | |
| | AACGTAAGTTTGATAATTTA | |
| | ACGAAAGCTGAACGTGGAGG | |
| | TTTGAGTGAACTTGATAAAG | |
| | CTGGTTTTATCAAACGCCAA | |
| | TTGGTTGAAACTCGCCAAAT | |
| | CACTAAGCATGTGGCACAAA | |
| | TTTTGGATAGTCGCATGAAT | |
| | ACTAAATACGATGAAAATGA | |
| | TAAACTTATTCGAGAGGTTA | |
| | AAGTGATTACCTTAAAATCT | |
| | AAATTAGTTTCTGACTTCCG | |
| | AAAAGATTTCCAATTCTATA | |
| | AAGTACGTGAGATTAACAAT | |
| | TACCATCATGCCCATGATGC | |
| | GTATCTAAATGCCGTCGTTG | |
| | GAACTGCTTTGATTAAGAAA | |
| | TATCCAAAACTTGAATCGGA | |
| | GTTTGTCTATGGTGATTATA | |
| | AAGTTTATGATGTTCGTAAA | |
| | ATGATTGCTAAGTCTGAGCA | |
| | AGAAATAGGCAAAGCAACCG | |
| | CAAAATATTTCTTTTACTCT | |
| | AATATCATGAACTTCTTCAA | |
| | AACAGAAATTACACTTGCAA | |
| | ATGGAGAGATTCGCAAACGC | |
| | CCTCTAATCGAAACTAATGG | |
| | GGAAACTGGAGAAATTGTCT | |
| | GGGATAAAGGGCGAGATTTT | |
| | GCCACAGTGCGCAAAGTATT | |
| | GTCCATGCCCCAAGTCAATA | |
| | TTGTCAAGAAAACAGAAGTA | |
| | CAGACAGGCGGATTCTCCAA | |
| | GGAGTCAATTTTACCAAAAA | |
| | GAAATTCGGACAAGCTTATT | |
| | GCTCGTAAAAAAGACTGGGA | |
| | TCCAAAAAAATATGGTGGTT | |
| | TTGATAGTCCAACGGTAGCT | |
| | TATTCAGTCCTAGTGGTTGC | |
| | TAAGGTGGAAAAAGGGAAAT | |
| | CGAAGAAGTTAAAATCCGTT | |
| | AAAGAGTTACTAGGGATCAC | |
| | AATTATGGAAAGAAGTTCCT | |
| | TTGAAAAAAATCCGATTGAC | |
| | TTTTTAGAAGCTAAAGGATA | |
| | TAAGGAAGTTAAAAAAGACT | |
| | TAATCATTAAACTACCTAAA | |
| | TATAGTCTTTTTGAGTTAGA | |
| | AAACGGTCGTAAACGGATGC | |
| | TGGCTAGTGCCGGAGAATTA | |
| | CAAAAAGGAAATGAGCTGGC | |
| | TCTGCCAAGCAAATATGTGA | |
| | ATTTTTTATATTTAGCTAGT | |
| | CATTATGAAAAGTTGAAGGG | |
| | TAGTCCAGAAGATAACGAAC | |
| | AAAAACAATTGTTTGTGGAG | |
| | CAGCATAAGCATTATTTAGA | |
| | TGAGATTATTGAGCAAATCA | |
| | GTGAATTTTCTAAGCGTGTT | |
| | ATTTTAGCAGATGCCAATTT | |
| | AGATAAAGTTCTTAGTGCAT | |
| | ATAACAAACATAGAGACAAA | |
| | CCAATACGTGAACAAGCAGA | |
| | AAATATTATTCATTTATTTA | |
| | CGTTGACGAATCTTGGAGCT | |
| | CCCGCTGCTTTTAAATATTT | |
| | TGATACAACAATTGATCGTA | |
| | AACGATATACGTCTACAAAA | |
| | GAAGTTTTAGATGCCACTCT | |
| | TATCCATCAATCCATCACTG | |
| | GTCTTTATGAAACACGCATT | |
| | GATTTGAGTCAGCTAGGAGG | |
| | TGACTGA | |
| SpCas9 | MDKKYSIGLDIGTNSVGWAV | |
| Streptococcus | ITDEYKVPSKKFKVLGNTDR | |
| pyogenes | HSIKKNLIGALLFDSGETAE | |
| M1GAS wild | ATRLKRTARRRYTRRKNRIC | |
| type | YLQEIFSNEMAKVDDSFFHR | |
| Encoded | LEESFLVEEDKKHERHPIFG | |
| product of | NIVDEVAYHEKYPTIYHLRK | |
| NC_002737.2 | KLVDSTDKADLRLIYLALAH | |
| (100% | MIKFRGHFLIEGDLNPDNSD | |
| identical to | VDKLFIQLVQTYNQLFEENP | |
| the canonical | INASGVDAKAILSARLSKSR | |
| Q99ZW2 | RLENLIAQLPGEKKNGLFGN | |
| wild type) | LIALSLGLTPNFKSNFDLAE | |
| | DAKLQLSKDTYDDDLDNLLA | |
| | QIGDQYADLFLAAKNLSDAI | |
| | LLSDILRVNTEITKAPLSAS | |
| | MIKRYDEHHQDLTLLKALVR | |
| | QQLPEKYKEIFFDQSKNGYA | |
| | GYIDGGASQEEFYKFIKPIL | |
| | EKMDGTEELLVKLNREDLLR | |
| | KQRTFDNGSIPHQIHLGELH | |
| | AILRRQEDFYPFLKDNREKI | |
| | EKILTFRIPYYVGPLARGNS | |
| | RFAWMTRKSEETITPWNFEE | |
| | VVDKGASAQSFIERMTNFDK | |
| | NLPNEKVLPKHSLLYEYFTV | |
| | YNELTKVKYVTEGMRKPAFL | |
| | SGEQKKAIVDLLFKTNRKVT | |
| | VKQLKEDYFKKIECFDSVEI | |
| | SGVEDRFNASLGTYHDLLKI | |
| | IKDKDFLDNEENEDILEDIV | |
| | LTLTLFEDREMIEERLKTYA | |
| | HLFDDKVMKQLKRRRYTGWG | |
| | RLSRKLINGIRDKQSGKTIL | |
| | DFLKSDGFANRNFMQLIHDD | |
| | SLTFKEDIQKAQVSGQGDSL | |
| | HEHIANLAGSPAIKKGILQT | |
| | VKVVDELVKVMGRHKPENIV | |
| | IEMARENQTTQKGQKNSRER | |
| | MKRIEEGIKELGSQILKEHP | |
| | VENTQLQNEKLYLYYLQNGR | |
| | DMYVDQELDINRLSDYDVDH | |
| | IVPQSFLKDDSIDNKVLTRS | |
| | DKNRGKSDNVPSEEVVKKMK | |
| | NYWRQLLNAKLITQRKFDNL | |
| | TKAERGGLSELDKAGFIKRQ | |
| | LVETRQITKHVAQILDSRMN | |
| | TKYDENDKLIREVKVITLKS | |
| | KLVSDFRKDFQFYKVREINN | |
| | YHHAHDAYLNAVVGTALIKK | |
| | YPKLESEFVYGDYKVYDVRK | |
| | MIAKSEQEIGKATAKYFFYS | |
| | NIMNFFKTEITLANGEIRKR | |
| | PLIETNGETGEIVWDKGRDF | |
| | ATVRKVLSMPQVNIVKKTEV | |
| | QTGGFSKESILPKRNSDKLI | |
| | ARKKDWDPKKYGGFDSPTVA | |
| | YSVLVVAKVEKGKSKKLKSV | |
| | KELLGITIMERSSFEKNPID | |
| | FLEAKGYKEVKKDLIIKLPK | |
| | YSLFELENGRKRMLASAGEL | |
| | QKGNELALPSKYVNFLYLAS | |
| | HYEKLKGSPEDNEQKQLFVE | |
| | QHKHYLDEIIEQISEFSKRV | |
| | ILADANLDKVLSAYNKHRDK | |
| | PIREQAENIIHLFTLTNLGA | |
| | PAAFKYFDTTIDRKRYTSTK | |
| | EVLDATLIHQSITGLYETRI | |
| | DLSQLGGD | |

[0185] The base editors described herein may include any of the above SpCas9 sequences, or any variant there of having at least 80%, at least 85%, at least 90%, at least 95%, or at least 99% sequence identity thereto.

### Wild Type Cas9 Orthologs

[0186] In other embodiments, the Cas9 protein can be a wild type Cas9 ortholog from another bacterial species. For example, the following Cas9 orthologs can be used in connection with the base editor constructs described in this disclosure. In addition, any variant Cas9 orthologs having at least 80%, at least 85%, at least 90%, at least 95%, or at least 99% sequence identity to any of the below orthologs may also be used with the disclosed base editors.

| Description | Sequence |
|---|---|
| LfCas9 | 1 MKEYHIGLDI GTSSIGWAVT DSQFKLMRIK GKTAIGVRLF EEGKTAAERR TFRTTRRRLK |
| Lactobacillus | 61 RRKWRLHYLD EIFAPHLQEV DENFLRRLKQ SNIHPEDPTK NQAFIGKLLF PDLLKKNERG |
| fermentum | 121 YPTLIKMRDE LPVEQRAHYP VMNIYKLREA MINEDRQFDL REVYLAVHHI VKYRGHFLNN |
| wild type | 181 ASVDKFKVGR IDFDKSFNVL NEAYEELQNG EGSFTIEPSK VEKIGQLLLD TKMRKLDRQK |
| GenBank: | 241 AVAKLLEVKV ADKEETKRNK QIATAMSKLV LGYKADFATV AMANGNEWKI DLSSETSEDE |
| SNX31424.1 1 | 301 IEKFREELSD AQNDILTEIT SLFSQIMLNE IVPNGMSISE SMMDRYWTHE RQLAEVKEYL |
| | 361 ATQPASARKE FDQVYNKYIG QAPKERGFDL EKGLKKILSK KENWKEIDEL LKAGDFLPKQ |
| | 421 RTSANGVIPH QMHQQELDRI IEKQAKYYPW LATENPATGE RDRHQAKYEL DQLVSFRIPY |
| | 481 YVGPLVTPEV QKATSGAKFA WAKRKEDGEI TPWNLWDKID RAESAEAFIK RMTVKDTYLL |
| | 541 NEDVLPANSL LYQKYNVLNE LNNVRVNGRR LSVGIKQDIY TELFKKKKTV KASDVASLVM |
| | 601 AKTRGVNKPS VEGLSDPKKF NSNLATYLDL KSIVGDKVDD NRYQTDLENI IEWRSVFEDG |
| | 661 EIFADKLTEV EWLTDEQRSA LVKKRYKGWG RLSKKLLTGI VDENGQRIID LMWNTDQNFK |
| | 721 EIVDQPVFKE QIDQLNQKAI TNDGMTLRER VESVLDDAYT SPQNKKAIWQ VVRVVEDIVK |
| | 781 AVGNAPKSIS IEFARNEGNK GEITRSRRTQ LQKLFEDQAH ELVKDTSLTE ELEKAPDLSD |
| | 841 RYYFYFTQGG KDMYTGDPIN FDEISTKYDI DHILPQSFVK DNSLDNRVLT SRKENNKKSD |
| | 901 QVPAKLYAAK MKPYWNQLLK QGLITQRKFE NLTKDVDQNI KYRSLGFVKR QLVETRQVIK |
| | 961 LTANILGSMY QEAGTEIIET RAGLTKQLRE EFDLPKVREV NDYHHAVDAY LTTFAGQYLN |
| | 1021 RRYPKLRSFF VYGEYMKFKH GSDLKLRNFN FFHELMEGDK SQGKVVDQQT GELITTRDEV |
| | 1081 AKSFDRLLNM KYMLVSKEVH DRSDQLYGAT IVTAKESGKL TSPIEIKKNR LVDLYGAYTN |
| | 1141 GTSAFMTIIK FTGNKPKYKV IGIPTTSAAS LKRAGKPGSE SYNQELHRII KSNPKVKKGF |
| | 1201 EIVVPHVSYG QLIVDGDCKF TLASPTVQHP ATQLVLSKKS LETISSGYKI LKDKPAIANE |
| | 1261 RLIRVFDEVV GQMNRYFTIF DQRSNRQKVA DARDKFLSLP TESKYEGAKK VQVGKTEVIT |
| | 1321 NLLMGLHANA TQGDLKVLGL ATFGFFQSTT GLSLSEDTMI VYQSPTGLFE RRICLKDI |
| | (SEQ ID NO: 8) |
| SaCas9 | MDKKYSIGLD IGTNSVGWAV ITDEYKVPSK KFKVLGNTDR HSIKKNLIGA LLFDSGETAE |
| Staphylococcus | ATRLKRTARR RYTRRKNRIC YLQEIFSNEM AKVDDSFFHR LEESFLVEED KKHERHPIFG |
| aureus wild | NIVDEVAYHE KYPTIYHLRK KLVDSTDKAD LRLIYLALAH MIKFRGHFLI EGDLNPDNSD |
| type | VDKLFIQLVQ TYNQLFEENP INASGVDAKA ILSARLSKSR RLENLIAQLP GEKKNGLFGN |
| GenBank: | LIALSLGLTP NFKSNFDLAE DAKLQLSKDT YDDDLDNLLA QIGDQYADLF LAAKNLSDAI |
| AYD60528.1 | LLSDILRVNT EITKAPLSAS MIKRYDEHHQ DLTLLKALVR QQLPEKYKEI FFDQSKNGYA |
| | GYIDGGASQE EFYKFIKPIL EKMDGTEELL VKLNREDLLR KQRTFDNGSI PHQIHLGELH |
| | AILRRQEDFY PFLKDNREKI EKILTFRIPY YVGPLARGNS RFAWMTRKSE ETITPWNFEE |
| | VVDKGASAQS FIERMTNFDK NLPNEKVLPK HSLLYEYFTV YNELTKVKYV TEGMRKPAFL |
| | SGEQKKAIVD LLFKTNRKVT VKQLKEDYFK KIECFDSVEI SGVEDRFNAS LGTYHDLLKI |
| | IKDKDFLDNE ENEDILEDIV LTLTLFEDRE MIEERLKTYA HLFDDKVMKQ LKRRRYTGWG |
| | RLSRKLINGI RDKQSGKTIL DFLKSDGFAN RNFMQLIHDD SLTFKEDIQK AQVSGQGDSL |
| | HEHIANLAGS PAIKKGILQT VKVVDELVKV MGRHKPENIV IEMARENQTT QKGQKNSRER |
| | MKRIEEGIKE LGSQILKEHP VENTQLQNEK LYLYYLQNGR DMYVDQELDI NRLSDYDVDH |
| | IVPQSFLKDD SIDNKVLTRS DKNRGKSDNV PSEEVVKKMK NYWRQLLNAK LITQRKFDNL |
| | TKAERGGLSE LDKAGFIKRQ LVETRQITKH VAQILDSRMN TKYDENDKLI REVKVITLKS |
| | KLVSDFRKDF QFYKVREINN YHHAHDAYLN AVVGTALIKK YPKLESEFVY GDYKVYDVRK |
| | MIAKSEQEIG KATAKYFFYS NIMNFFKTEI TLANGEIRKR PLIETNGETG EIVWDKGRDF |
| | ATVRKVLSMP QVNIVKKTEV QTGGFSKESI LPKRNSDKLI ARKKDWDPKK YGGFDSPTVA |
| | YSVLVVAKVE KGKSKKLKSV KELLGITIME RSSFEKNPID FLEAKGYKEV KKDLIIKLPK |
| | YSLFELENGR KRMLASAGEL QKGNELALPS KYVNFLYLAS HYEKLKGSPE DNEQKQLFVE |
| | QHKHYLDEII EQISEFSKRV ILADANLDKV LSAYNKHRDK PIREQAENII HLFTLTNLGA |
| | PAAFKYFDTT IDRKRYTSTK EVLDATLIHQ SITGLYETRI DLSQLGGD |
| | (SEQ ID NO: 9) |
| SaCas9 | MGKRNYILGLDIGITSVGYGIIDYETRDVIDAGVRLFKEANVENNEGRRSKRGARRLKRRRRHRIQRVKKLL |
| Staphylococcus | FDYNLLTDHSELSGINPYEARVKGLSQKLSEEEFSAALLHLAKRRGVHNVNEVEEDTGNELSTKEQISRNSK |
| aureus | ALEEKYVAELQLERLKKDGEVRGSINRFKTSDYVKEAKQLLKVQKAYHQLDQSFIDTYIDLLETRRTYYEGP |
| | GEGSPFGWKDIKEWYEMLMGHCTYFPEELRSVKYAYNADLYNALNDLNNLVITRDENEKLEYYEKFQIIENV |
| | FKQKKKPTLKQIAKEILVNEEDIKGYRVTSTGKPEFTNLKVYHDIKDITARKEIIENAELLDQIAKILTIYQ |
| | SSEDIQEELTNLNSELTQEEIEQISNLKGYTGTHNLSLKAINLILDELWHTNDNQIAIFNRLKLVPKKVDLS |
| | QQKEIPTTLVDDFILSPVVKRSFIQSIKVINAIIKKYGLPNDIIIELAREKNSKDAQKMINEMQKRNRQTNE |
| | RIEEIIRTTGKENAKYLIEKIKLHDMQEGKCLYSLEAIPLEDLLNNPFNYEVDHIIPRSVSFDNSFNNKVLV |
| | KQEENSKKGNRTPFQYLSSSDSKISYETFKKHILNLAKGKGRISKTKKEYLLEERDINRFSVQKDFINRNLV |
| | DTRYATRGLMNLLRSYFRVNNLDVKVKSINGGFTSFLRRKWKFKKERNKGYKHHAEDALIIANADFIFKEWK |
| | KLDKAKKVMENQMFEEKQAESMPEIETEQEYKEIFITPHQIKHIKDFKDYKYSHRVDKKPNRKLINDTLYST |
| | RKDDKGNTLIVNNLNGLYDKDNDKLKKLINKSPEKLLMYHHDPQTYQKLKLIMEQYGDEKNPLYKYYEETGN |
| | YLTKYSKKDNGPVIKKIKYYGNKLNAHLDITDDYPNSRNKVVKLSLKPYRFDVYLDNGVYKFVTVKNLDVIK |
| | KENYYEVNSKCYEEAKKLKKISNQAEFIASFYKNDLIKINGELYRVIGVNNDLLNRIEVNMIDITYREYLEN |
| | MNDKRPPHIIKTIASKTQSIKKYSTDILGNLYEVKSKKHPQIIKK |
| | (SEQ ID NO: 11) |
| StCas9 | 1 MLFNKCIIIS INLDFSNKEK CMTKPYSIGL DIGTNSVGWA VITDNYKVPS KKMKVLGNTS |
| Streptococcus | 61 KKYIKKNLLG VLLFDSGITA EGRRLKRTAR RRYTRRRNRI LYLQEIFSTE MATLDDAFFQ |
| thermophilus | 121 RLDDSFLVPD DKRDSKYPIF GNLVEEKVYH DEFPTIYHLR KYLADSTKKA DLRLVYLALA |
| UniProtKB/ | 181 HMIKYRGHFL IEGEFNSKNN DIQKNFQDFL DTYNAIFESD LSLENSKQLE EIVKDKISKL |
| Swiss-Prot: | 241 EKKDRILKLF PGEKNSGIFS EFLKLIVGNQ ADFRKCFNLD EKASLHFSKE SYDEDLETLL |
| G3ECR1.2 | 301 GYIGDDYSDV FLKAKKLYDA ILLSGFLTVT DNETEAPLSS AMIKRYNEHK EDLALLKEYI |
| Wild type | 361 RNISLKTYNE VFKDDTKNGY AGYIDGKTNQ EDFYVYLKNL LAEFEGADYF LEKIDREDFL |
| | 421 RKQRTFDNGS IPYQIHLQEM RAILDKQAKF YPFLAKNKER IEKILTFRIP YYVGPLARGN |
| | 481 SDFAWSIRKR NEKITPWNFE DVIDKESSAE AFINRMTSFD LYLPEEKVLP KHSLLYETFN |
| | 541 VYNELTKVRF IAESMRDYQF LDSKQKKDIV RLYFKDKRKV TDKDIIEYLH AIYGYDGIEL |
| | 601 KGIEKQFNSS LSTYHDLLNI INDKEFLDDS SNEAIIEEII HTLTIFEDRE MIKQRLSKFE |
| | 661 NIFDKSVLKK LSRRHYTGWG KLSAKLINGI RDEKSGNTIL DYLIDDGISN RNFMQLIHDD |
| | 721 ALSFKKKIQK AQIIGDEDKG NIKEVVKSLP GSPAIKKGIL QSIKIVDELV KVMGGRKPES |
| | 781 IVVEMARENQ YTNQGKSNSQ QRLKRLEKSL KELGSKILKE NIPAKLSKID NNALQNDRLY |
| | 841 LYYLQNGKDM YTGDDLDIDR LSNYDIDHII PQAFLKDNSI DNKVLVSSAS NRGKSDDFPS |
| | 901 LEVVKKRKTF WYQLLKSKLI SQRKFDNLTK AERGGLLPED KAGFIQRQLV ETRQITKHVA |
| | 961 RLLDEKFNNK KDENNRAVRT VKIITLKSTL VSQFRKDFEL YKVREINDFH HAHDAYLNAV |
| | 1021 IASALLKKYP KLEPEFVYGD YPKYNSFRER KSATEKVYFY SNIMNIFKKS ISLADGRVIE |
| | 1081 RPLIEVNEET GESVWNKESD LATVRRVLSY PQVNVVKKVE EQNHGLDRGK PKGLFNANLS |
| | 1141 SKPKPNSNEN LVGAKEYLDP KKYGGYAGIS NSFAVLVKGT IEKGAKKKIT NVLEFQGISI |
| | 1201 LDRINYRKDK LNFLLEKGYK DIELIIELPK YSLFELSDGS RRMLASILST NNKRGEIHKG |
| | 1261 NQIFLSQKFV KLLYHAKRIS NTINENHRKY VENHKKEFEE LFYYILEFNE NYVGAKKNGK |
| | 1321 LLNSAFQSWQ NHSIDELCSS FIGPTGSERK GLFELTSRGS AADFEFLGVK IPRYRDYTPS |
| | 1381 SLLKDATLIH QSVTGLYETR IDLAKLGEG |
| | (SEQ ID NO: 12) |
| LcCas9 | 1 MKIKNYNLAL TPSTSAVGHV EVDDDLNILE PVHHQKAIGV AKFGEGETAE ARRLARSARR |
| Lactobacillus | 61 TTKRRANRIN HYFNEIMKPE IDKVDPLMFD RIKQAGLSPL DERKEFRTVI FDRPNIASYY |
| crispatus | 121 HNQFPTIWHL QKYLMITDEK ADIRLIYWAL HSLLKHRGHF FNTTPMSQFK PGKLNLKDDM |
| NCBI Reference | 181 LALDDYNDLE GLSFAVANSP EIEKVIKDRS MHKKEKIAEL KKLIVNDVPD KDLAKRNNKI |
| Sequence: | 241 ITQIVNAIMG NSFHLNFIFD MDLDKLTSKA WSFKLDDPEL DTKFDAISGS MTDNQIGIFE |
| WP_133478044. | 301 TLQKIYSAIS LLDILNGSSN VVDAKNALYD KHKRDLNLYF KFLNTLPDEI AKTLKAGYTL |
| 1 | 361 YIGNRKKDLL AARKLLKVNV AKNFSQDDFY KLINKELKSI DKQGLQTRFS EKVGELVAQN |
| Wild type | 421 NFLPVQRSSD NVFIPYQLNA ITFNKILENQ GKYYDFLVKP NPAKKDRKNA PYELSQLMQF |
| | 481 TIPYYVGPLV TPEEQVKSGI PKTSRFAWMV RKDNGAITPW NFYDKVDIEA TADKFIKRSI |
| | 541 AKDSYLLSEL VLPKHSLLYE KYEVFNELSN VSLDGKKLSG GVKQILFNEV FKKTNKVNTS |
| | 601 RILKALAKHN IPGSKITGLS NPEEFTSSLQ TYNAWKKYFP NQIDNFAYQQ DLEKMIEWST |
| | 661 VFEDHKILAK KLDEIEWLDD DQKKFVANTR LRGWGRLSKR LLTGLKDNYG KSIMQRLETT |
| | 721 KANFQQIVYK PEFREQIDKI SQAAAKNQSL EDILANSYTS PSNRKAIRKT MSVVDEYIKL |
| | 781 NHGKEPDKIF LMFQRSEQEK GKQTEARSKQ LNRILSQLKA DKSANKLFSK QLADEFSNAI |
| | 841 KKSKYKLNDK QYFYFQQLGR DALTGEVIDY DELYKYTVLH IIPRSKLTDD SQNNKVLTKY |
| | 901 KIVDGSVALK FGNSYSDALG MPIKAFWTEL NRLKLIPKGK LLNLTTDFST LNKYQRDGYI |
| | 961 ARQLVETQQI VKLLATIMQS RFKHTKIIEV RNSQVANIRY QFDYFRIKNL NEYYRGFDAY |
| | 1021 LAAVVGTYLY KVYPKARRLF VYGQYLKPKK TNQENQDMHL DSEKKSQGFN FLWNLLYGKQ |
| | 1081 DQIFVNGTDV IAFNRKDLIT KMNTVYNYKS QKISLAIDYH NGAMFKATLF PRNDRDTAKT |
| | 1141 RKLIPKKKDY DTDIYGGYTS NVDGYMLLAE IIKRDGNKQY GFYGVPSRLV SELDTLKKTR |
| | 1201 YTEYEEKLKE IIKPELGVDL KKIKKIKILK NKVPFNQVII DKGSKFFITS TSYRWNYRQL |
| | 1261 ILSAESQQTL MDLVVDPDFS NHKARKDARK NADERLIKVY EEILYQVKNY MPMFVELHRC |
| | 1321 YEKLVDAQKT FKSLKISDKA MVLNQILILL HSNATSPVLE KLGYHTRFTL GKKHNLISEN |
| | 1381 AVLVTQSITG LKENHVSIKQ ML |
| | (SEQ ID NO: 13) |
| PdCas9 | 1 MTNEKYSIGL DIGTSSIGFA VVNDNNRVIR VKGKNAIGVR LFDEGKAAAD RRSFRTTRRS |
| Pedicoccus | 61 FRTTRRRLSR RRWRLKLLRE IFDAYITPVD EAFFIRLKES NLSPKDSKKQ YSGDILFNDR |
| damnosus | 121 SDKDFYEKYP TIYHLRNALM TEHRKFDVRE IYLAIHHIMK FRGHFLNATP ANNFKVGRLN |
| NCBI Reference | 181 LEEKFEELND IYQRVFPDES IEFRTDNLEQ IKEVLLDNKR SRADRQRTLV SDIYQSSEDK |
| Sequence: | 241 DIEKRNKAVA TEILKASLGN KAKLNVITNV EVDKEAAKEW SITFDSESID DDLAKIEGQM |
| WP_062913273. | 301 TDDGHEIIEV LRSLYSGITL SAIVPENHTL SQSMVAKYDL HKDHLKLFKK LINGMTDTKK |
| 1 | 361 AKNLRAAYDG YIDGVKGKVL PQEDFYKQVQ VNLDDSAEAN EIQTYIDQDI FMPKQRTKAN |
| Wild type | 421 GSIPHQLQQQ ELDQIIENQK AYYPWLAELN PNPDKKRQQL AKYKLDELVT FRVPYYVGPM |
| | 481 ITAKDQKNQS GAEFAWMIRK EPGNITPWNF DQKVDRMATA NQFIKRMTTT DTYLLGEDVL |
| | 541 PAQSLLYQKF EVLNELNKIR IDHKPISIEQ KQQIFNDLFK QFKNVTIKHL QDYLVSQGQY |
| | 601 SKRPLIEGLA DEKRFNSSLS TYSDLCGIFG AKLVEENDRQ EDLEKIIEWS TIFEDKKIYR |
| | 661 AKLNDLTWLT DDQKEKLATK RYQGWGRLSR KLLVGLKNSE HRNIMDILWI TNENFMQIQA |
| | 721 EPDFAKLVTD ANKGMLEKTD SQDVINDLYT SPQNKKAIRQ ILLVVHDIQN AMHGQAPAKI |
| | 781 HVEFARGEER NPRRSVQRQR QVEAAYEKVS NELVSAKVRQ EFKEAINNKR DFKDRLFLYF |
| | 841 MQGGIDIYTG KQLNIDQLSS YQIDHILPQA FVKDDSLTNR VLTNENQVKA DSVPIDIFGK |
| | 901 KMLSVWGRMK DQGLISKGKY RNLTMNPENI SAHTENGFIN RQLVETRQVI KLAVNILADE |
| | 961 YGDSTQIISV KADLSHQMRE DFELLKNRDV NDYHHAFDAY LAAFIGNYLL KRYPKLESYF |
| | 1021 VYGDFKKFTQ KETKMRRFNF IYDLKHCDQV VNKETGEILW TKDEDIKYIR HLFAYKKILV |
| | 1081 SHEVREKRGA LYNQTIYKAK DDKGSGQESK KLIRIKDDKE TKIYGGYSGK SLAYMTIVQI |
| | 1141 TKKNKVSYRV IGIPTLALAR LNKLENDSTE NNGELYKIIK PQFTHYKVDK KNGEIIETTD |
| | 1201 DFKIVVSKVR FQQLIDDAGQ FFMLASDTYK NNAQQLVISN NALKAINNTN ITDCPRDDLE |
| | 1261 RLDNLRLDSA FDEIVKKMDK YFSAYDANNF REKIRNSNLI FYQLPVEDQW ENNKITELGK |
| | 1321 RTVLTRILQG LHANATTTDM SIFKIKTPFG QLRQRSGISL SENAQLIYQS PTGLFERRVQ |
| | 1381 LNKIK |
| | (SEQ ID NO: 14) |
| FnCas9 | 1 MKKQKFSDYY LGFDIGTNSV GWCVTDLDYN VLRFNKKDMW GSRLFEEAKT AAERRVQRNS |
| Fusobacterium | 61 RRRLKRRKWR LNLLEEIFSN EILKIDSNFF RRLKESSLWL EDKSSKEKFT LFNDDNYKDY |
| nucleatum | 121 DFYKQYPTIF HLRNELIKNP EKKDIRLVYL AIHSIFKSRG HFLFEGQNLK EIKNFETLYN |
| NCBI Reference | 181 NLIAFLEDNG INKIIDKNNI EKLEKIVCDS KKGLKDKEKE FKEIFNSDKQ LVAIFKLSVG |
| Sequence: | 241 SSVSLNDLFD TDEYKKGEVE KEKISFREQI YEDDKPIYYS ILGEKIELLD IAKTFYDFMV |
| WP_060798984. | 301 LNNILADSQY ISEAKVKLYE EHKKDLKNLK YIIRKYNKGN YDKLFKDKNE NNYSAYIGLN |
| 1 | 361 KEKSKKEVIE KSRLKIDDLI KNIKGYLPKV EEIEEKDKAI FNKILNKIEL KTILPKQRIS |
| | 421 DNGTLPYQIH EAELEKILEN QSKYYDFLNY EENGIITKDK LLMTFKFRIP YYVGPLNSYH |
| | 481 KDKGGNSWIV RKEEGKILPW NFEQKVDIEK SAEEFIKRMT NKCTYLNGED VIPKDTFLYS |
| | 541 EYVILNELNK VQVNDEFLNE ENKRKIIDEL FKENKKVSEK KFKEYLLVKQ IVDGTIELKG |
| | 601 VKDSFNSNYI SYIRFKDIFG EKLNLDIYKE ISEKSILWKC LYGDDKKIFE KKIKNEYGDI |
| | 661 LTKDEIKKIN TFKFNNWGRL SEKLLTGIEF INLETGECYS SVMDALRRTN YNLMELLSSK |
| | 721 FTLQESINNE NKEMNEASYR DLIEESYVSP SLKRAIFQTL KIYEEIRKIT GRVPKKVFIE |
| | 781 MARGGDESMK NKKIPARQEQ LKKLYDSCGN DIANFSIDIK EMKNSLISYD NNSLRQKKLY |
| | 841 LYYLQFGKCM YTGREIDLDR LLQNNDTYDI DHIYPRSKVI KDDSFDNLVL VLKNENAEKS |
| | 901 NEYPVKKEIQ EKMKSFWRFL KEKNFISDEK YKRLTGKDDF ELRGFMARQL VNVRQTTKEV |
| | 961 GKILQQIEPE IKIVYSKAEI ASSFREMFDF IKVRELNDTH HAKDAYLNIV AGNVYNTKFT |
| | 1021 EKPYRYLQEI KENYDVKKIY NYDIKNAWDK ENSLEIVKKN MEKNTVNITR FIKEKKGQLF |
| | 1081 DLNPIKKGET SNEIISIKPK VYNGKDDKLN EKYGYYKSLN PAYFLYVEHK EKNKRIKSFE |
| | 1141 RVNLVDVNNI KDEKSLVKYL IENKKLVEPR VIKKVYKRQV ILINDYPYSI VTLDSNKLMD |
| | 1201 FENLKPLFLE NKYEKILKNV IKFLEDNQGK SEENYKFIYL KKKDRYEKNE TLESVKDRYN |
| | 1261 LEFNEMYDKF LEKLDSKDYK NYMNNKKYQE LLDVKEKFIK LNLFDKAFTL KSFLDLFNRK |
| | 1321 TMADFSKVGL TKYLGKIQKI SSNVLSKNEL YLLEESVTGL FVKKIKL |
| | (SEQ ID NO: 82) |
| EcCas9 | 61 RRKQRIQILQ ELLGEEVLKT DPGFFHRMKE SRYVVEDKRT LDGKQVELPY ALFVDKDYTD |
| Enterococcus | 121 KEYYKQFPTI NHLIVYLMTT SDTPDIRLVY LALHYYMKNR GNFLHSGDIN NVKDINDILE |
| cecorum | 181 QLDNVLETFL DGWNLKLKSY VEDIKNIYNR DLGRGERKKA FVNTLGAKTK AEKAFCSLIS |
| NCBI Reference | 241 GGSTNLAELF DDSSLKEIET PKIEFASSSL EDKIDGIQEA LEDRFAVIEA AKRLYDWKTL |
| Sequence: | 301 TDILGDSSSL AEARVNSYQM HHEQLLELKS LVKEYLDRKV FQEVFVSLNV ANNYPAYIGH |
| WP_047338501. | 361 TKINGKKKEL EVKRTKRNDF YSYVKKQVIE PIKKKVSDEA VLTKLSEIES LIEVDKYLPL |
| 1 | 421 QVNSDNGVIP YQVKLNELTR IFDNLENRIP VLRENRDKII KTFKFRIPYY VGSLNGVVKN |
| Wild type | 481 GKCTNWMVRK EEGKIYPWNF EDKVDLEASA EQFIRRMTNK CTYLVNEDVL PKYSLLYSKY |
| | 541 LVLSELNNLR IDGRPLDVKI KQDIYENVFK KNRKVTLKKI KKYLLKEGII TDDDELSGLA |
| | 601 DDVKSSLTAY RDFKEKLGHL DLSEAQMENI ILNITLFGDD KKLLKKRLAA LYPFIDDKSL |
| | 661 NRIATLNYRD WGRLSERFLS GITSVDQETG ELRTIIQCMY ETQANLMQLL AEPYHFVEAI |
| | 721 EKENPKVDLE SISYRIVNDL YVSPAVKRQI WQTLLVIKDI KQVMKHDPER IFIEMAREKQ |
| | 781 ESKKTKSRKQ VLSEVYKKAK EYEHLFEKLN SLTEEQLRSK KIYLYFTQLG KCMYSGEPID |
| | 841 FENLVSANSN YDIDHIYPQS KTIDDSFNNI VLVKKSLNAY KSNHYPIDKN IRDNEKVKTL |
| | 901 WNTLVSKGLI TKEKYERLIR STPFSDEELA GFIARQLVET RQSTKAVAEI LSNWFPESEI |
| | 961 VYSKAKNVSN FRQDFEILKV RELNDCHHAH DAYLNIVVGN AYHTKFTNSP YRFIKNKANQ |
| | 1021 EYNLRKLLQK VNKIESNGVV AWVGQSENNP GTIATVKKVI RRNTVLISRM VKEVDGQLFD |
| | 1081 LTLMKKGKGQ VPIKSSDERL TDISKYGGYN KATGAYFTFV KSKKRGKVVR SFEYVPLHLS |
| | 1141 KQFENNNELL KEYIEKDRGL TDVEILIPKV LINSLFRYNG SLVRITGRGD TRLLLVHEQP |
| | 1201 LYVSNSFVQQ LKSVSSYKLK KSENDNAKLT KTATEKLSNI DELYDGLLRK LDLPIYSYWF |
| | 1261 SSIKEYLVES RTKYIKLSIE EKALVIFEIL HLFQSDAQVP NLKILGLSTK PSRIRIQKNL |
| | 1321 KDTDKMSIIH QSPSGIFEHE IELTSL (SEQ ID NO: 15) |
| AhCas9 | 1 MQNGFLGITV SSEQVGWAVT NPKYELERAS RKDLWGVRLF DKAETAEDRR MFRTNRRLNQ |
| Anaerostipes | 61 RKKNRIHYLR DIFHEEVNQK DPNFFQQLDE SNFCEDDRTV EFNFDTNLYK NQFPTVYHLR |
| hadrus | 121 KYLMETKDKP DIRLVYLAFS KFMKNRGHFL YKGNLGEVMD FENSMKGFCE SLEKFNIDFP |
| NCBI Reference | 181 TLSDEQVKEV RDILCDHKIA KTVKKKNIIT ITKVKSKTAK AWIGLFCGCS VPVKVLFQDI |
| Sequence: | 241 DEEIVTDPEK ISFEDASYDD YIANIEKGVG IYYEAIVSAK MLFDWSILNE ILGDHQLLSD |
| WP_044924278. | 301 AMIAEYNKHH DDLKRLQKII KGTGSRELYQ DIFINDVSGN YVCYVGHAKT MSSADQKQFY |
| 1 | 361 TFLKNRLKNV NGISSEDAEW IDTEIKNGTL LPKQTKRDNS VIPHQLQLRE FELILDNMQE |
| Wild type | 421 MYPFLKENRE KLLKIFNFVI PYYVGPLKGV VRKGESTNWM VPKKDGVIHP WNFDEMVDKE |
| | 481 ASAECFISRM TGNCSYLFNE KVLPKNSLLY ETFEVLNELN PLKINGEPIS VELKQRIYEQ |
| | 541 LFLTGKKVTK KSLTKYLIKN GYDKDIELSG IDNEFHSNLK SHIDFEDYDN LSDEEVEQII |
| | 601 LRITVFEDKQ LLKDYLNREF VKLSEDERKQ ICSLSYKGWG NLSEMLLNGI TVTDSNGVEV |
| | 661 SVMDMLWNTN LNLMQILSKK YGYKAEIEHY NKEHEKTIYN REDLMDYLNI PPAQRRKVNQ |
| | 721 LITIVKSLKK TYGVPNKIFF KISREHQDDP KRTSSRKEQL KYLYKSLKSE DEKHLMKELD |
| | 781 ELNDHELSND KVYLYFLQKG RCIYSGKKLN LSRLRKSNYQ NDIDYIYPLS AVNDRSMNNK |
| | 841 VLTGIQENRA DKYTYFPVDS EIQKKMKGFW MELVLQGFMT KEKYFRLSRE NDFSKSELVS |
| | 901 FIEREISDNQ QSGRMIASVL QYYFPESKIV FVKEKLISSF KRDFHLISSY GHNHLQAAKD |
| | 961 AYITIVVGNV YHTKFTMDPA IYFKNHKRKD YDLNRLFLEN ISRDGQIAWE SGPYGSIQTV |
| | 1021 RKEYAQNHIA VTKRVVEVKG GLFKQMPLKK GHGEYPLKTN DPRFGNIAQY GGYTNVTGSY |
| | 1081 FVLVESMEKG KKRISLEYVP VYLHERLEDD PGHKLLKEYL VDHRKLNHPK ILLAKVRKNS |
| | 1141 LLKIDGFYYR LNGRSGNALI LTNAVELIMD DWQTKTANKI SGYMKRRAID KKARVYQNEF |
| | 1201 HIQELEQLYD FYLDKLKNGV YKNRKNNQAE LIHNEKEQFM ELKTEDQCVL LTEIKKLFVC |
| | 1261 SPMQADLTLI GGSKHTGMIA MSSNVTKADF AVIAEDPLGL RNKVIYSHKG EK |
| | (SEQ ID NO: 16) |
| KvCas9 | 1 MSQNNNKIYN IGLDIGDASV GWAVVDEHYN LLKRHGKHMW GSRLFTQANT AVERRSSRST |
| Kandleria | 61 RRRYNKRRER IRLLREIMED MVLDVDPTFF IRLANVSFLD QEDKKDYLKE NYHSNYNLFI |
| vitulina | 121 DKDFNDKTYY DKYPTIYHLR KHLCESKEKE DPRLIYLALH HIVKYRGNFL YEGQKFSMDV |
| NCBI Reference | 181 SNIEDKMIDV LRQFNEINLF EYVEDRKKID EVLNVLKEPL SKKHKAEKAF ALFDTTKDNK |
| Sequence: | 241 AAYKELCAAL AGNKFNVTKM LKEAELHDED EKDISFKFSD ATFDDAFVEK QPLLGDCVEF |
| WP_031589969. | 301 IDLLHDIYSW VELQNILGSA HTSEPSISAA MIQRYEDHKN DLKLLKDVIR KYLPKKYFEV |
| 1 | 361 FRDEKSKKNN YCNYINHPSK TPVDEFYKYI KKLIEKIDDP DVKTILNKIE LESFMLKQNS |
| Wild type | 421 RTNGAVPYQM QLDELNKILE NQSVYYSDLK DNEDKIRSIL TFRIPYYFGP LNITKDRQFD |
| | 481 WIIKKEGKEN ERILPWNANE IVDVDKTADE FIKRMRNFCT YFPDEPVMAK NSLTVSKYEV |
| | 541 LNEINKLRIN DHLIKRDMKD KMLHTLFMDH KSISANAMKK WLVKNQYFSN TDDIKIEGFQ |
| | 601 KENACSTSLT PWIDFTKIFG KINESNYDFI EKIIYDVTVF EDKKILRRRL KKEYDLDEEK |
| | 661 IKKILKLKYS GWSRLSKKLL SGIKTKYKDS TRTPETVLEV MERTNMNLMQ VINDEKLGFK |
| | 721 KTIDDANSTS VSGKFSYAEV QELAGSPAIK RGIWQALLIV DEIKKIMKHE PAHVYIEFAR |
| | 781 NEDEKERKDS FVNQMLKLYK DYDFEDETEK EANKHLKGED AKSKIRSERL KLYYTQMGKC |
| | 841 MYTGKSLDID RLDTYQVDHI VPQSLLKDDS IDNKVLVLSS ENQRKLDDLV IPSSIRNKMY |
| | 901 GFWEKLFNNK IISPKKFYSL IKTEFNEKDQ ERFINRQIVE TRQITKHVAQ IIDNHYENTK |
| | 961 VVTVRADLSH QFRERYHIYK NRDINDFHHA HDAYIATILG TYIGHRFESL DAKYIYGEYK |
| | 1021 RIFRNQKNKG KEMKKNNDGF ILNSMRNIYA DKDTGEIVWD PNYIDRIKKC FYYKDCFVTK |
| | 1081 KLEENNGTFF NVTVLPNDTN SDKDNTLATV PVNKYRSNVN KYGGFSGVNS FIVAIKGKKK |
| | 1141 KGKKVIEVNK LTGIPLMYKN ADEEIKINYL KQAEDLEEVQ IGKEILKNQL IEKDGGLYYI |
| | 1201 VAPTEIINAK QLILNESQTK LVCEIYKAMK YKNYDNLDSE KIIDLYRLLI NKMELYYPEY |
| | 1261 RKQLVKKFED RYEQLKVISI EEKCNIIKQI LATLHCNSSI GKIMYSDFKI STTIGRLNGR |
| | 1321 TISLDDISFI AESPTGMYSK KYKL (SEQ ID NO: 17) |
| EfCas9 | 1 MRLFEEGHTA EDRRLKRTAR RRISRRRNRL RYLQAFFEEA MTDLDENFFA RLQESFLVPE |
| Enterococcus | 61 DKKWHRHPIF AKLEDEVAYH ETYPTIYHLR KKLADSSEQA DLRLIYLALA HIVKYRGHFL |
| faecalis | 121 IEGKLSTENT SVKDQFQQFM VIYNQTFVNG ESRLVSAPLP ESVLIEEELT EKASRTKKSE |
| NCBI | 181 KVLQQFPQEK ANGLFGQFLK LMVGNKADFK KVFGLEEEAK ITYASESYEE DLEGILAKVG |
| Reference | 241 DEYSDVFLAA KNVYDAVELS TILADSDKKS HAKLSSSMIV RFTEHQEDLK KFKRFIRENC |
| Sequence: | 301 PDEYDNLFKN EQKDGYAGYI AHAGKVSQLK FYQYVKKIIQ DIAGAEYFLE KIAQENFLRK |
| WP_016631044. | 361 QRTFDNGVIP HQIHLAELQA IIHRQAAYYP FLKENQEKIE QLVTFRIPYY VGPLSKGDAS |
| 1 | 421 TFAWLKRQSE EPIRPWNLQE TVDLDQSATA FIERMTNFDT YLPSEKVLPK HSLLYEKFMV |
| Wild type | 481 FNELTKISYT DDRGIKANFS GKEKEKIFDY LFKTRRKVKK KDIIQFYRNE YNTEIVTLSG |
| | 541 LEEDQFNASF STYQDLLKCG LTRAELDHPD NAEKLEDIIK ILTIFEDRQR IRTQLSTFKG |
| | 601 QFSAEVLKKL ERKHYTGWGR LSKKLINGIY DKESGKTILD YLVKDDGVSK HYNRNFMQLI |
| | 661 NDSQLSFKNA IQKAQSSEHE ETLSETVNEL AGSPAIKKGI YQSLKIVDEL VAIMGYAPKR |
| | 721 IVVEMARENQ TTSTGKRRSI QRLKIVEKAM AEIGSNLLKE QPTTNEQLRD TRLFLYYMQN |
| | 781 GKDMYTGDEL SLHRLSHYDI DHIIPQSFMK DDSLDNLVLV GSTENRGKSD DVPSKEVVKD |
| | 841 MKAYWEKLYA AGLISQRKFQ RLTKGEQGGL TLEDKAHFIQ RQLVETRQIT KNVAGILDQR |
| | 901 YNAKSKEKKV QIITLKASLT SQFRSIFGLY KVREVNDYHH GQDAYLNCVV ATTLLKVYPN |
| | 961 LAPEFVYGEY PKFQTFKENK ATAKAIIYTN LLRFFTEDEP RFTKDGEILW SNSYLKTIKK |
| | 1021 ELNYHQMNIV KKVEVQKGGF SKESIKPKGP SNKLIPVKNG LDPQKYGGFD SPVVAYTVLF |
| | 1081 THEKGKKPLI KQEILGITIM EKTRFEQNPI LFLEEKGFLR PRVLMKLPKY TLYEFPEGRR |
| | 1141 RLLASAKEAQ KGNQMVLPEH LLTLLYHAKQ CLLPNQSESL AYVEQHQPEF QEILERVVDF |
| | 1201 AEVHTLAKSK VQQIVKLFEA NQTADVKEIA ASFIQLMQFN AMGAPSTFKF FQKDIERARY |
| | 1261 TSIKEIFDAT IIYQSPTGLY ETRRKVVD (SEQ ID NO: 18) |
| Staphylococcus | KRNYILGLDIGITSVGYGIIDYETRDVIDAGVRLFKEANVENNEGRRSKRGARRLKRRRRHRIQRVKKLLFD |
| aureus Cas9 | YNLLTDHSELSGINPYEARVKGLSQKLSEEEFSAALLHLAKRRGVHNVNEVEEDTGNELSTKEQISRNSKAL |
| | EEKYVAELQLERLKKDGEVRGSINRFKTSDYVKEAKQLLKVQKAYHQLDQSFIDTYIDLLETRRTYYEGPGE |
| | GSPFGWKDIKEWYEMLMGHCTYFPEELRSVKYAYNADLYNALNDLNNLVITRDENEKLEYYEKFQIIENVFK |
| | QKKKPTLKQIAKEILVNEEDIKGYRVTSTGKPEFTNLKVYHDIKDITARKEIIENAELLDQIAKILTIYQSS |
| | EDIQEELTNLNSELTQEEIEQISNLKGYTGTHNLSLKAINLILDELWHTNDNQIAIFNRLKLVPKKVDLSQQ |
| | KEIPTTLVDDFILSPVVKRSFIQSIKVINAIIKKYGLPNDIIIELAREKNSKDAQKMINEMQKRNRQTNERI |
| | EEIIRTTGKENAKYLIEKIKLHDMQEGKCLYSLEAIPLEDLLNNPFNYEVDHIIPRSVSFDNSFNNKVLVKQ |
| | EENSKKGNRTPFQYLSSSDSKISYETFKKHILNLAKGKGRISKTKKEYLLEERDINRFSVQKDFINRNLVDT |
| | RYATRGLMNLLRSYFRVNNLDVKVKSINGGFTSFLRRKWKFKKERNKGYKHHAEDALIIANADFIFKEWKKL |
| | DKAKKVMENQMFEEKQAESMPEIETEQEYKEIFITPHQIKHIKDFKDYKYSHRVDKKPNRELINDTLYSTRK |
| | DDKGNTLIVNNLNGLYDKDNDKLKKLINKSPEKLLMYHHDPQTYQKLKLIMEQYGDEKNPLYKYYEETGNYL |
| | TKYSKKDNGPVIKKIKYYGNKLNAHLDITDDYPNSRNKVVKLSLKPYRFDVYLDNGVYKFVTVKNLDVIKKE |
| | NYYEVNSKCYEEAKKLKKISNQAEFIASFYNNDLIKINGELYRVIGVNNDLLNRIEVNMIDITYREYLENMN |
| | DKRPPRIIKTIASKTQSIKKYSTDILGNLYEVKSKKHPQIIKKG |
| | (SEQ ID NO: 216) |
| ScCas9 | MEKKYSIGLDIGTNSVGWAVITDDYKVPSKKFKVLGNTNRKSIKKNLMGALLFDSGETAEATRLKRTARRRY |
| S. canis | TRRKNRIRYLQEIFANEMAKLDDSFFQRLEESFLVEEDKKNERHPIFGNLADEVAYHRNYPTIYHLRKKLAD |
| 1375 AA | SPEKADLRLIYLALAHIIKFRGHFLIEGKLNAENSDVAKLFYQLIQTYNQLFEESPLDEIEVDAKGILSARL |
| 159.2 kDa | SKSKRLEKLIAVFPNEKKNGLFGNIIALALGLTPNFKSNFDLTEDAKLQLSKDTYDDDLDELLGQIGDQYAD |
| | LFSAAKNLSDAILLSDILRSNSEVTKAPLSASMVKRYDEHHQDLALLKTLVRQQFPEKYAEIFKDDTKNGYA |
| | GYVGIGIKHRKRTTKLATQEEFYKFIKPILEKMDGAEELLAKLNRDDLLRKQRTFDNGSIPHQIHLKELHAI |
| | LRRQEEFYPFLKENREKIEKILTFRIPYYVGPLARGNSRFAWLTRKSEEAITPWNFEEVVDKGASAQSFIER |
| | MTNFDEQLPNKKVLPKHSLLYEYFTVYNELTKVKYVTERMRKPEFLSGEQKKAIVDLLFKTNRKVTVKQLKE |
| | DYFKKIECFDSVEIIGVEDRFNASLGTYHDLLKIIKDKDFLDNEENEDILEDIVLTLTLFEDREMIEERLKT |
| | YAHLFDDKVMKQLKRRHYTGWGRLSRKMINGIRDKQSGKTILDFLKSDGFSNRNFMQLIHDDSLTFKEEIEK |
| | AQVSGQGDSLHEQIADLAGSPAIKKGILQTVKIVDELVKVMGHKPENIVIEMARENQTTTKGLQQSRERKKR |
| | IEEGIKELESQILKENPVENTQLQNEKLYLYYLQNGRDMYVDQELDINRLSDYDVDHIVPQSFIKDDSIDNK |
| | VLTRSVENRGKSDNVPSEEVVKKMKNYWRQLLNAKLITQRKFDNLTKAERGGLSEADKAGFIKRQLVETRQI |
| | TKHVARILDSRMNTKRDKNDKPIREVKVITLKSKLVSDFRKDFQLYKVRDINNYHHAHDAYLNAVVGTALIK |
| | KYPKLESEFVYGDYKVYDVRKMIAKSEQEIGKATAKRFFYSNIMNFFKTEVKLANGEIRKRPLIETNGETGE |
| | VVWNKEKDFATVRKVLAMPQVNIVKKTEVQTGGFSKESILSKRESAKLIPRKKGWDTRKYGGFGSPTVAYSI |
| | LVVAKVEKGKAKKLKSVKVLVGITIMEKGSYEKDPIGFLEAKGYKDIKKELIFKLPKYSLFELENGRRRMLA |
| | SATELQKANELVLPQHLVRLLYYTQNISATTGSNNLGYIEQHREEFKEIFEKIIDFSEKYILKNKVNSNLKS |
| | SFDEQFAVSDSILLSNSFVSLLKYTSFGASGGFTFLDLDVKQGRLRYQTVTEVLDATLIYQSITGLYETRTD |
| | LSQLGGD (SEQ ID NO: 19) |

[0187] The base editors described herein may include any of the above Cas9 ortholog sequences, or any variants thereof having at least 80%, at least 85%, at least 90%, at least 95%, or at least 99% sequence identity thereto.

[0188] The napDNAbp may include any suitable homologs and/or orthologs or naturally occurring enzymes, such as Cas9. Cas9 homologs and/or orthologs have been described in various species, including, but not limited to, S. pyogenes and S. thermophilus. Preferably, the Cas moiety is configured (e.g, mutagenized, recombinantly engineered, or otherwise obtained from nature) as a nickase, i.e., capable of cleaving only a single strand of the target doubpdditional suitable Cas9 nucleases and sequences will be apparent to those of skill in the art based on this disclosure, and such Cas9 nucleases and sequences include Cas9 sequences from the organisms and loci disclosed in Chylinski, Rhun, and Charpentier, “The tracrRNA and Cas9 families of type II CRISPR-Cas immunity systems” (2013) RNA Biology 10:5, 726-737; the entire contents of which are incorporated herein by reference. In some embodiments, a Cas9 nuclease has an inactive (e.g., an inactivated) DNA cleavage domain, that is, the Cas9 is a nickase. In some embodiments, the Cas9 protein comprises an amino acid sequence that is at least 80% identical to the amino acid sequence of a Cas9 protein as provided by any one of the variants of Table 3. In some embodiments, the Cas9 protein comprises an amino acid sequence that is at least 85%, at least 90%, at least 92%, at least 95%, at least 96%, at least 97%, at least 98%, at least 99%, or at least 99.5% identical to the amino acid sequence of a Cas9 protein as provided by any one of the Cas9 orthologs in the above tables.

Dead napDNAbp Variants

[0189] In some embodiments, the disclosed base editors may comprise a catalytically inactive, or “dead,” napDNAbp domain. Exemplary catalytically inactive domains in the disclosed base editors are dead S. pyogenes Cas9 (dSpCas9) and S. pyogenes Cas9 nickase (SpCas9n).

[0190] In certain embodiments, the base editors described herein may include a dead Cas9, e.g., dead SpCas9, which has no nuclease activity due to one or more mutations that inactivate both nuclease domains of SpCas9, namely the RuvC domain (which cleaves the non-protospacer DNA strand) and HNH domain (which cleaves the protospacer DNA strand). The nuclease inactivation may be due to one or mutations that result in one or more substitutions and/or deletions in the amino acid sequence of the encoded protein, or any variants thereof having at least 80%, at least 85%, at least 90%, at least 95%, or at least 99% sequence identity thereto.

[0191] In certain embodiments, the base editors described herein may include a dead Cas9, e.g., dead SpCas9, which has no nuclease activity due to one or more mutations that inactivate both nuclease domains of SpCas9, namely the RuvC domain (which cleaves the non-protospacer DNA strand) and HNH domain (which cleaves the protospacer DNA strand). The D10A and N580A mutations in the wild-type S. aureus Cas9 amino acid sequence may be used to form a dSaCas9. Accordingly, in some embodiments, the napDNAbp domain of the base editors provided herein comprises a dSaCas9 that has D10A and N580A mutations relative to the wild-type SaCas9 sequence (SEQ ID NO: 216).

[0192] As used herein, the term “dCas9” refers to a nuclease-inactive Cas9 or nuclease-dead Cas9, or a functional fragment thereof, and embraces any naturally occurring dCas9 from any organism, any naturally-occurring dCas9 equivalent or functional fragment thereof, any dCas9 homolog, ortholog, or paralog from any organism, and any mutant or variant of a dCas9, naturally-occurring or engineered. The term dCas9 is not meant to be particularly limiting and may be referred to as a “dCas9 or equivalent.” Exemplary dCas9 proteins and method for making dCas9 proteins are further described herein and/or are described in the art and are incorporated herein by reference.

[0193] In other embodiments, dCas9 corresponds to, or comprises in part or in whole, a Cas9 amino acid sequence having one or more mutations that inactivate the Cas9 nuclease activity. In other embodiments, Cas9 variants having mutations other than D10A and H840A are provided which may result in the full or partial inactivate of the endogenous Cas9 nuclease activity (e.g., nCas9 or dCas9, respectively). Such mutations, by way of example, include other amino acid substitutions at D10 and H820, or other substitutions within the nuclease domains of Cas9 (e.g., substitutions in the HNH nuclease subdomain and/or the RuvC1 subdomain) with reference to a wild type sequence such as Cas9 from Streptococcus pyogenes (NCBI Reference Sequence: NC_017053.1). In some embodiments, variants or homologues of Cas9 (e.g., variants of Cas9 from Streptococcus pyogenes (NCBI Reference Sequence: NC_017053.1)) are provided which are at least about 70% identical, at least about 80% identical, at least about 90% identical, at least about 95% identical, at least about 98% identical, at least about 99% identical, at least about 99.5% identical, or at least about 99.9% identical to NCBI Reference Sequence: NC_017053.1. In some embodiments, variants of dCas9 (e.g., variants of NCBI Reference Sequence: NC_017053.1) are provided having amino acid sequences which are shorter, or longer than NC_017053.1 by about 5 amino acids, by about 10 amino acids, by about 15 amino acids, by about 20 amino acids, by about 25 amino acids, by about 30 amino acids, by about 40 amino acids, by about 50 amino acids, by about 75 amino acids, by about 100 amino acids or more.

[0194] In some embodiments, the napDNAbp domain of any of the disclosed base editors comprises a dead S. pyogenes Cas9 (dSpCas9). In some embodiments, the napDNAbp domain of any of the disclosed based editors is comprises at least 80%, at least 85%, at least 90%, at least 95%, or at least 99% sequence identity to SEQ ID NO: 214. In some embodiments, the napDNAbp domain of any of the disclosed base editors comprises the amino acid sequence of SEQ ID NO: 214.

[0195] In one embodiment, the dead Cas9 may be based on the canonical SpCas9 sequence of Q99ZW2 and may have the following sequence, which comprises a D10A and an H810A substitutions (underlined and bolded), or a variant of SEQ ID NO: 214 having at least 80%, at least 85%, at least 90%, at least 95%, or at least 99% sequence identity thereto:

| | | SEQ ID |
|---|---|---|
| Description | Sequence | NO: |
| dead Cas9 or | MDKKYSIGL [symbol] IGTNSVGWAVITDEYKVPSKKFKVLGNTDRHSIKKNLIGALLFDSGETAEA | SEQ ID |
| dCas9 | TRLKRTARRRYTRRKNRICYLQEIFSNEMAKVDDSFFHRLEESFLVEEDKKHERHPIFGNI | NO: 20 |
| Streptococcus | VDEVAYHEKYPTIYHLRKKLVDSTDKADLRLIYLALAHMIKFRGHFLIEGDLNPDNSDVDK | |
| pyogenes | LFIQLVQTYNQLFEENPINASGVDAKAILSARLSKSRRLENLIAQLPGEKKNGLFGNLIAL | |
| Q99ZW2 Cas9 | SLGLTPNFKSNFDLAEDAKLQLSKDTYDDDLDNLLAQIGDQYADLFLAAKNLSDAILLSDI | |
| with D10 [symbol] and | LRVNTEITKAPLSASMIKRYDEHHQDLTLLKALVRQQLPEKYKEIFFDQSKNGYAGYIDGG | |
| H810 [symbol] | ASQEEFYKFIKPILEKMDGTEELLVKLNREDLLRKQRTFDNGSIPHQIHLGELHAILRRQE | |
| Where “X” is | DFYPFLKDNREKIEKILTFRIPYYVGPLARGNSRFAWMTRKSEETITPWNFEEVVDKGASA | |
| any amino | QSFIERMTNFDKNLPNEKVLPKHSLLYEYFTVYNELTKVKYVTEGMRKPAFLSGEQKKAIV | |
| acid | DLLFKTNRKVTVKQLKEDYFKKIECFDSVEISGVEDRFNASLGTYHDLLKIIKDKDFLDNE | |
| | ENEDILEDIVLTLTLFEDREMIEERLKTYAHLFDDKVMKQLKRRRYTGWGRLSRKLINGIR | |
| | DKQSGKTILDFLKSDGFANRNFMQLIHDDSLTFKEDIQKAQVSGQGDSLHEHIANLAGSPA | |
| | IKKGILQTVKVVDELVKVMGRHKPENIVIEMARENQTTQKGQKNSRERMKRIEEGIKELGS | |
| | QILKEHPVENTQLQNEKLYLYYLQNGRDMYVDQELDINRLSDYDVD [symbol] IVPQSFLKDDSIDN | |
| | KVLTRSDKNRGKSDNVPSEEVVKKMKNYWRQLLNAKLITQRKFDNLTKAERGGLSELDKAG | |
| | FIKRQLVETRQITKHVAQILDSRMNTKYDENDKLIREVKVITLKSKLVSDFRKDFQFYKVR | |
| | EINNYHHAHDAYLNAVVGTALIKKYPKLESEFVYGDYKVYDVRKMIAKSEQEIGKATAKYF | |
| | FYSNIMNFFKTEITLANGEIRKRPLIETNGETGEIVWDKGRDFATVRKVLSMPQVNIVKKT | |
| | EVQTGGFSKESILPKRNSDKLIARKKDWDPKKYGGFDSPTVAYSVLVVAKVEKGKSKKLKS | |
| | VKELLGITIMERSSFEKNPIDFLEAKGYKEVKKDLIIKLPKYSLFELENGRKRMLASAGEL | |
| | QKGNELALPSKYVNFLYLASHYEKLKGSPEDNEQKQLFVEQHKHYLDEIIEQISEFSKRVI | |
| | LADANLDKVLSAYNKHRDKPIREQAENIIHLFTLTNLGAPAAFKYFDTTIDRKRYTSTKEV | |
| | LDATLIHQSITGLYETRIDLSQLGGD | |
| dead Cas9 or | MDKKYSIGL [symbol] IGTNSVGWAVITDEYKVPSKKFKVLGNTDRHSIKKNLIGALLFDSGETAEA | SEQ ID |
| dCas9 | TRLKRTARRRYTRRKNRICYLQEIFSNEMAKVDDSFFHRLEESFLVEEDKKHERHPIFGNI | NO: 214 |
| Streptococcus | VDEVAYHEKYPTIYHLRKKLVDSTDKADLRLIYLALAHMIKFRGHFLIEGDLNPDNSDVDK | |
| pyogenes | LFIQLVQTYNQLFEENPINASGVDAKAILSARLSKSRRLENLIAQLPGEKKNGLFGNLIAL | |
| Q99ZW2 Cas9 | SLGLTPNFKSNFDLAEDAKLQLSKDTYDDDLDNLLAQIGDQYADLFLAAKNLSDAILLSDI | |
| with D10 [symbol] and | LRVNTEITKAPLSASMIKRYDEHHQDLTLLKALVRQQLPEKYKEIFFDQSKNGYAGYIDGG | |
| H810 [symbol] | ASQEEFYKFIKPILEKMDGTEELLVKLNREDLLRKQRTFDNGSIPHQIHLGELHAILRRQE | |
| | DFYPFLKDNREKIEKILTFRIPYYVGPLARGNSRFAWMTRKSEETITPWNFEEVVDKGASA | |
| | QSFIERMTNFDKNLPNEKVLPKHSLLYEYFTVYNELTKVKYVTEGMRKPAFLSGEQKKAIV | |
| | DLLFKTNRKVTVKQLKEDYFKKIECFDSVEISGVEDRFNASLGTYHDLLKIIKDKDFLDNE | |
| | ENEDILEDIVLTLTLFEDREMIEERLKTYAHLFDDKVMKQLKRRRYTGWGRLSRKLINGIR | |
| | DKQSGKTILDFLKSDGFANRNFMQLIHDDSLTFKEDIQKAQVSGQGDSLHEHIANLAGSPA | |
| | IKKGILQTVKVVDELVKVMGRHKPENIVIEMARENQTTQKGQKNSRERMKRIEEGIKELGS | |
| | QILKEHPVENTQLQNEKLYLYYLQNGRDMYVDQELDINRLSDYDVD [symbol] IVPQSFLKDDSIDN | |
| | KVLTRSDKNRGKSDNVPSEEVVKKMKNYWRQLLNAKLITQRKFDNLTKAERGGLSELDKAG | |
| | FIKRQLVETRQITKHVAQILDSRMNTKYDENDKLIREVKVITLKSKLVSDFRKDFQFYKVR | |
| | EINNYHHAHDAYLNAVVGTALIKKYPKLESEFVYGDYKVYDVRKMIAKSEQEIGKATAKYF | |
| | FYSNIMNFFKTEITLANGEIRKRPLIETNGETGEIVWDKGRDFATVRKVLSMPQVNIVKKT | |
| | EVQTGGFSKESILPKRNSDKLIARKKDWDPKKYGGFDSPTVAYSVLVVAKVEKGKSKKLKS | |
| | VKELLGITIMERSSFEKNPIDFLEAKGYKEVKKDLIIKLPKYSLFELENGRKRMLASAGEL | |
| | QKGNELALPSKYVNFLYLASHYEKLKGSPEDNEQKQLFVEQHKHYLDEIIEQISEFSKRVI | |
| | LADANLDKVLSAYNKHRDKPIREQAENIIHLFTLTNLGAPAAFKYFDTTIDRKRYTSTKEV | |
| | LDATLIHQSITGLYETRIDLSQLGGD | |
| dead | MSKLEKFTNCYSLSKTLRFKAIPVGKTQENIDNKRLLVEDEKRAEDYKGVKKLLDRYYLSF | SEQ ID |
| Lachnospiraceae | INDVLHSIKLKNLNNYISLFRKKTRTEKENKELENLEINLRKEIAKAFKGNEGYKSLFKKD | NO: 21 |
| bacterium | IIETILPEFLDDKDEIALVNSFNGFTTAFTGFFDNRENMFSEEAKSTSIAFRCINENLTRY | |
| Cas12a | ISNMDIFEKVDAIFDKHEVQEIKEKILNSDYDVEDFFEGEFFNFVLTQEGIDVYNAIIGGF | |
| | VTESGEKIKGLNEYINLYNQKTKQKLPKFKPLYKQVLSDRESLSFYGEGYTSDEEVLEVFR | |
| | NTLNKNSEIFSSIKKLEKLFKNFDEYSSAGIFVKNGPAISTISKDIFGEWNVIRDKWNAEY | |
| | DDIHLKKKAVVTEKYEDDRRKSFKKIGSFSLEQLQEYADADLSVVEKLKEIIIQKVDEIYK | |
| | VYGSSEKLFDADFVLEKSLKKNDAVVAIMKDLLDSVKSFENYIKAFFGEGKETNRDESFYG | |
| | DFVLAYDILLKVDHIYDAIRNYVTQKPYSKDKFKLYFQNPQFMGGWDKDKETDYRATILRY | |
| | GSKYYLAIMDKKYAKCLQKIDKDDVNGNYEKINYKLLPGPNKMLPKVFFSKKWMAYYNPSE | |
| | DIQKIYKNGTFKKGDMFNLNDCHKLIDFFKDSISRYPKWSNAYDFNFSETEKYKDIAGFYR | |
| | EVEEQGYKVSFESASKKEVDKLVEEGKLYMFQIYNKDFSDKSHGTPNLHTMYFKLLFDENN | |
| | HGQIRLSGGAELFMRRASLKKEELVVHPANSPIANKNPDNPKKTTTLSYDVYKDKRFSEDQ | |
| | YELHIPIAINKCPKNIFKINTEVRVLLKHDDNPYVIGIARGERNLLYIVVVDGKGNIVEQY | |
| | SLNEIINNFNGIRIKTDYHSLLDKKEKERFEARQNWTSIENIKELKAGYISQVVHKICELV | |
| | EKYDAVIALEDLNSGFKNSRVKVEKQVYQKFEKMLIDKLNYMVDKKSNPCATGGALKGYQI | |
| | TNKFESFKSMSTQNGFIFYIPAWLTSKIDPSTGFVNLLKTKYTSIADSKKFISSFDRIMYV | |
| | PEEDLFEFALDYKNFSRTDADYIKKWKLYSYGNRIRIFRNPKKNNVFDWEEVCLTSAYKEL | |
| | FNKYGINYQQGDIRALLCEQSDKAFYSSFMALMSLMLQMRNSITGRTDVDFLISPVKNSDG | |
| | IFYDSRNYEAQENAILPKNADANGAYNIARKVLWAIGQFKKAEDEKLDKVKIAISNKEWLE | |
| | YAQTSVK | |

napDNAbp Nickase Variants

[0196] In some embodiments, the disclosed base editors may comprise a napDNAbp domain that comprises a nickase. In some embodiments, the base editors described herein comprise a Cas9 nickase. The term “Cas9 nickase” of “nCas9” refers to a variant of Cas9 which is capable of introducing a single-strand break in a double strand DNA molecule target. In some embodiments, the Cas9 nickase comprises only a single functioning nuclease domain. The wild type Cas9 (e.g., the canonical SpCas9) comprises two separate nuclease domains, namely, the RuvC domain (which cleaves the non-protospacer DNA strand) and HNH domain (which cleaves the protospacer DNA strand). In one embodiment, the Cas9 nickase comprises a mutation in the RuvC domain which inactivates the RuvC nuclease activity. For example, mutations in aspartate (D) 10, histidine (H) 983, aspartate (D) 986, or glutamate (E) 762, have been reported as loss-of-function mutations of the RuvC nuclease domain and the creation of a functional Cas9 nickase (e.g., Nishimasu et al., “Crystal structure of Cas9 in complex with guide RNA and target DNA,” Cell 156(5), 935-949, which is incorporated herein by reference). Thus, nickase mutations in the RuvC domain could include D10X, H983X, D986X, or E762X, wherein X is any amino acid other than the wild type amino acid. In certain embodiments, the nickase could be D10A, of H983A, or D986A, or E762A, or a combination thereof.

[0197] In some embodiments, the napDNAbp domain of any of the disclosed base editors comprises an S. pyogenes Cas9 nickase (SpCas9n). In some embodiments, the napDNAbp domain of any of the disclosed based editors is comprises at least 80%, at least 85%, at least 90%, at least 95%, or at least 99% sequence identity to SEQ ID NO: 215 or 222. In some embodiments, the napDNAbp domain of any of the disclosed base editors comprises the amino acid sequence of SEQ ID NO: 215. In some embodiments, the napDNAbp domain of any of the disclosed base editors comprises the amino acid sequence of SEQ ID NO: 222.

[0198] In some embodiments, the napDNAbp domain of any of the disclosed base editors comprises an S. aureus Cas9 nickase (SaCas9n). In some embodiments, the napDNAbp domain of any of the disclosed based editors is comprises at least 80%, at least 85%, at least 90%, at least 95%, or at least 99% sequence identity to SEQ ID NO: 29. In some embodiments, the napDNAbp domain of any of the disclosed base editors comprises the amino acid sequence of SEQ ID NO:29.

[0199] In various embodiments, the Cas9 nickase can having a mutation in the RuvC nuclease domain and have one of the following amino acid sequences, or a variant thereof having an amino acid sequence that has at least 80%, at least 85%, at least 90%, at least 95%, or at least 99% sequence identity thereto.

| | | SEQ ID |
|---|---|---|
| Description | Sequence | NO: |
| Cas9 nickase | MDKKYSIGLXIGTNSVGWAVITDEYKVPSKKFKVLGNTDRHSIKKNLIGALLFDSGETAEA | SEQ ID |
| Streptococcus | TRLKRTARRRYTRRKNRICYLQEIFSNEMAKVDDSFFHRLEESFLVEEDKKHERHPIFGNI | NO: 22 |
| pyogenes | VDEVAYHEKYPTIYHLRKKLVDSTDKADLRLIYLALAHMIKFRGHFLIEGDLNPDNSDVDK | |
| Q99ZW2 Cas9 | LFIQLVQTYNQLFEENPINASGVDAKAILSARLSKSRRLENLIAQLPGEKKNGLFGNLIAL | |
| with D10X, | SLGLTPNFKSNFDLAEDAKLQLSKDTYDDDLDNLLAQIGDQYADLFLAAKNLSDAILLSDI | |
| wherein X is | LRVNTEITKAPLSASMIKRYDEHHQDLTLLKALVRQQLPEKYKEIFFDQSKNGYAGYIDGG | |
| any alternate | ASQEEFYKFIKPILEKMDGTEELLVKLNREDLLRKQRTFDNGSIPHQIHLGELHAILRRQE | |
| amino acid | DFYPFLKDNREKIEKILTFRIPYYVGPLARGNSRFAWMTRKSEETITPWNFEEVVDKGASA | |
| | QSFIERMTNFDKNLPNEKVLPKHSLLYEYFTVYNELTKVKYVTEGMRKPAFLSGEQKKAIV | |
| | DLLFKTNRKVTVKQLKEDYFKKIECFDSVEISGVEDRFNASLGTYHDLLKIIKDKDFLDNE | |
| | ENEDILEDIVLTLTLFEDREMIEERLKTYAHLFDDKVMKQLKRRRYTGWGRLSRKLINGIR | |
| | DKQSGKTILDFLKSDGFANRNFMQLIHDDSLTFKEDIQKAQVSGQGDSLHEHIANLAGSPA | |
| | IKKGILQTVKVVDELVKVMGRHKPENIVIEMARENQTTQKGQKNSRERMKRIEEGIKELGS | |
| | QILKEHPVENTQLQNEKLYLYYLQNGRDMYVDQELDINRLSDYDVDHIVPQSFLKDDSIDN | |
| | KVLTRSDKNRGKSDNVPSEEVVKKMKNYWRQLLNAKLITQRKFDNLTKAERGGLSELDKAG | |
| | FIKRQLVETRQITKHVAQILDSRMNTKYDENDKLIREVKVITLKSKLVSDFRKDFQFYKVR | |
| | EINNYHHAHDAYLNAVVGTALIKKYPKLESEFVYGDYKVYDVRKMIAKSEQEIGKATAKYF | |
| | FYSNIMNFFKTEITLANGEIRKRPLIETNGETGEIVWDKGRDFATVRKVLSMPQVNIVKKT | |
| | EVQTGGFSKESILPKRNSDKLIARKKDWDPKKYGGFDSPTVAYSVLVVAKVEKGKSKKLKS | |
| | VKELLGITIMERSSFEKNPIDFLEAKGYKEVKKDLIIKLPKYSLFELENGRKRMLASAGEL | |
| | QKGNELALPSKYVNFLYLASHYEKLKGSPEDNEQKQLFVEQHKHYLDEIIEQISEFSKRVI | |
| | LADANLDKVLSAYNKHRDKPIREQAENIIHLFTLTNLGAPAAFKYFDTTIDRKRYTSTKEV | |
| | LDATLIHQSITGLYETRIDLSQLGGD | |
| Cas9 nickase | MDKKYSIGLDIGTNSVGWAVITDEYKVPSKKFKVLGNTDRHSIKKNLIGALLFDSGETAEA | SEQ ID |
| Streptococcus | TRLKRTARRRYTRRKNRICYLQEIFSNEMAKVDDSFFHRLEESFLVEEDKKHERHPIFGNI | NO: 23 |
| pyogenes | VDEVAYHEKYPTIYHLRKKLVDSTDKADLRLIYLALAHMIKFRGHFLIEGDLNPDNSDVDK | |
| Q99ZW2 Cas9 | LFIQLVQTYNQLFEENPINASGVDAKAILSARLSKSRRLENLIAQLPGEKKNGLFGNLIAL | |
| with E762X, | SLGLTPNFKSNFDLAEDAKLQLSKDTYDDDLDNLLAQIGDQYADLFLAAKNLSDAILLSDI | |
| wherein X is | LRVNTEITKAPLSASMIKRYDEHHQDLTLLKALVRQQLPEKYKEIFFDQSKNGYAGYIDGG | |
| any alternate | ASQEEFYKFIKPILEKMDGTEELLVKLNREDLLRKQRTFDNGSIPHQIHLGELHAILRRQE | |
| amino acid | DFYPFLKDNREKIEKILTFRIPYYVGPLARGNSRFAWMTRKSEETITPWNFEEVVDKGASA | |
| | QSFIERMTNFDKNLPNEKVLPKHSLLYEYFTVYNELTKVKYVTEGMRKPAFLSGEQKKAIV | |
| | DLLFKTNRKVTVKQLKEDYFKKIECFDSVEISGVEDRFNASLGTYHDLLKIIKDKDFLDNE | |
| | ENEDILEDIVLTLTLFEDREMIEERLKTYAHLFDDKVMKQLKRRRYTGWGRLSRKLINGIR | |
| | DKQSGKTILDFLKSDGFANRNFMQLIHDDSLTFKEDIQKAQVSGQGDSLHEHIANLAGSPA | |
| | IKKGILQTVKVVDELVKVMGRHKPENIVIXMARENQTTQKGQKNSRERMKRIEEGIKELGS | |
| | QILKEHPVENTQLQNEKLYLYYLQNGRDMYVDQELDINRLSDYDVDHIVPQSFLKDDSIDN | |
| | KVLTRSDKNRGKSDNVPSEEVVKKMKNYWRQLLNAKLITQRKFDNLTKAERGGLSELDKAG | |
| | FIKRQLVETRQITKHVAQILDSRMNTKYDENDKLIREVKVITLKSKLVSDFRKDFQFYKVR | |
| | EINNYHHAHDAYLNAVVGTALIKKYPKLESEFVYGDYKVYDVRKMIAKSEQEIGKATAKYF | |
| | FYSNIMNFFKTEITLANGEIRKRPLIETNGETGEIVWDKGRDFATVRKVLSMPQVNIVKKT | |
| | EVQTGGFSKESILPKRNSDKLIARKKDWDPKKYGGFDSPTVAYSVLVVAKVEKGKSKKLKS | |
| | VKELLGITIMERSSFEKNPIDFLEAKGYKEVKKDLIIKLPKYSLFELENGRKRMLASAGEL | |
| | QKGNELALPSKYVNFLYLASHYEKLKGSPEDNEQKQLFVEQHKHYLDEIIEQISEFSKRVI | |
| | LADANLDKVLSAYNKHRDKPIREQAENIIHLFTLTNLGAPAAFKYFDTTIDRKRYTSTKEV | |
| | LDATLIHQSITGLYETRIDLSQLGGD | |
| Cas9 nickase | MDKKYSIGLDIGTNSVGWAVITDEYKVPSKKFKVLGNTDRHSIKKNLIGALLFDSGETAEA | SEQ ID |
| Streptococcus | TRLKRTARRRYTRRKNRICYLQEIFSNEMAKVDDSFFHRLEESFLVEEDKKHERHPIFGNI | NO: 24 |
| pyogenes | VDEVAYHEKYPTIYHLRKKLVDSTDKADLRLIYLALAHMIKFRGHFLIEGDLNPDNSDVDK | |
| Q99ZW2 Cas9 | LFIQLVQTYNQLFEENPINASGVDAKAILSARLSKSRRLENLIAQLPGEKKNGLFGNLIAL | |
| with H983X, | SLGLTPNFKSNFDLAEDAKLQLSKDTYDDDLDNLLAQIGDQYADLFLAAKNLSDAILLSDI | |
| wherein X is | LRVNTEITKAPLSASMIKRYDEHHQDLTLLKALVRQQLPEKYKEIFFDQSKNGYAGYIDGG | |
| any alternate | ASQEEFYKFIKPILEKMDGTEELLVKLNREDLLRKQRTFDNGSIPHQIHLGELHAILRRQE | |
| amino acid | DFYPFLKDNREKIEKILTFRIPYYVGPLARGNSRFAWMTRKSEETITPWNFEEVVDKGASA | |
| | QSFIERMTNFDKNLPNEKVLPKHSLLYEYFTVYNELTKVKYVTEGMRKPAFLSGEQKKAIV | |
| | DLLFKTNRKVTVKQLKEDYFKKIECFDSVEISGVEDRFNASLGTYHDLLKIIKDKDFLDNE | |
| | ENEDILEDIVLTLTLFEDREMIEERLKTYAHLFDDKVMKQLKRRRYTGWGRLSRKLINGIR | |
| | DKQSGKTILDFLKSDGFANRNFMQLIHDDSLTFKEDIQKAQVSGQGDSLHEHIANLAGSPA | |
| | IKKGILQTVKVVDELVKVMGRHKPENIVIEMARENQTTQKGQKNSRERMKRIEEGIKELGS | |
| | QILKEHPVENTQLQNEKLYLYYLQNGRDMYVDQELDINRLSDYDVDHIVPQSFLKDDSIDN | |
| | KVLTRSDKNRGKSDNVPSEEVVKKMKNYWRQLLNAKLITQRKFDNLTKAERGGLSELDKAG | |
| | FIKRQLVETRQITKHVAQILDSRMNTKYDENDKLIREVKVITLKSKLVSDFRKDFQFYKVR | |
| | EINNYHXAHDAYLNAVVGTALIKKYPKLESEFVYGDYKVYDVRKMIAKSEQEIGKATAKYF | |
| | FYSNIMNFFKTEITLANGEIRKRPLIETNGETGEIVWDKGRDFATVRKVLSMPQVNIVKKT | |
| | EVQTGGFSKESILPKRNSDKLIARKKDWDPKKYGGFDSPTVAYSVLVVAKVEKGKSKKLKS | |
| | VKELLGITIMERSSFEKNPIDFLEAKGYKEVKKDLIIKLPKYSLFELENGRKRMLASAGEL | |
| | QKGNELALPSKYVNFLYLASHYEKLKGSPEDNEQKQLFVEQHKHYLDEIIEQISEFSKRVI | |
| | LADANLDKVLSAYNKHRDKPIREQAENIIHLFTLTNLGAPAAFKYFDTTIDRKRYTSTKEV | |
| | LDATLIHQSITGLYETRIDLSQLGGD | |
| Cas9 nickase | MDKKYSIGLDIGTNSVGWAVITDEYKVPSKKFKVLGNTDRHSIKKNLIGALLFDSGETAEA | SEQ ID |
| Streptococcus | TRLKRTARRRYTRRKNRICYLQEIFSNEMAKVDDSFFHRLEESFLVEEDKKHERHPIFGNI | NO: 25 |
| pyogenes | VDEVAYHEKYPTIYHLRKKLVDSTDKADLRLIYLALAHMIKFRGHFLIEGDLNPDNSDVDK | |
| Q99ZW2 Cas9 | LFIQLVQTYNQLFEENPINASGVDAKAILSARLSKSRRLENLIAQLPGEKKNGLFGNLIAL | |
| with D986X, | SLGLTPNFKSNFDLAEDAKLQLSKDTYDDDLDNLLAQIGDQYADLFLAAKNLSDAILLSDI | |
| wherein X is | LRVNTEITKAPLSASMIKRYDEHHQDLTLLKALVRQQLPEKYKEIFFDQSKNGYAGYIDGG | |
| any alternate | ASQEEFYKFIKPILEKMDGTEELLVKLNREDLLRKQRTFDNGSIPHQIHLGELHAILRRQE | |
| amino acid | DFYPFLKDNREKIEKILTFRIPYYVGPLARGNSRFAWMTRKSEETITPWNFEEVVDKGASA | |
| | QSFIERMTNFDKNLPNEKVLPKHSLLYEYFTVYNELTKVKYVTEGMRKPAFLSGEQKKAIV | |
| | DLLFKTNRKVTVKQLKEDYFKKIECFDSVEISGVEDRFNASLGTYHDLLKIIKDKDFLDNE | |
| | ENEDILEDIVLTLTLFEDREMIEERLKTYAHLFDDKVMKQLKRRRYTGWGRLSRKLINGIR | |
| | DKQSGKTILDFLKSDGFANRNFMQLIHDDSLTFKEDIQKAQVSGQGDSLHEHIANLAGSPA | |
| | IKKGILQTVKVVDELVKVMGRHKPENIVIEMARENQTTQKGQKNSRERMKRIEEGIKELGS | |
| | QILKEHPVENTQLQNEKLYLYYLQNGRDMYVDQELDINRLSDYDVDHIVPQSFLKDDSIDN | |
| | KVLTRSDKNRGKSDNVPSEEVVKKMKNYWRQLLNAKLITQRKFDNLTKAERGGLSELDKAG | |
| | FIKRQLVETRQITKHVAQILDSRMNTKYDENDKLIREVKVITLKSKLVSDFRKDFQFYKVR | |
| | EINNYHHAHXAYLNAVVGTALIKKYPKLESEFVYGDYKVYDVRKMIAKSEQEIGKATAKYF | |
| | FYSNIMNFFKTEITLANGEIRKRPLIETNGETGEIVWDKGRDFATVRKVLSMPQVNIVKKT | |
| | EVQTGGFSKESILPKRNSDKLIARKKDWDPKKYGGFDSPTVAYSVLVVAKVEKGKSKKLKS | |
| | VKELLGITIMERSSFEKNPIDFLEAKGYKEVKKDLIIKLPKYSLFELENGRKRMLASAGEL | |
| | QKGNELALPSKYVNFLYLASHYEKLKGSPEDNEQKQLFVEQHKHYLDEIIEQISEFSKRVI | |
| | LADANLDKVLSAYNKHRDKPIREQAENIIHLFTLTNLGAPAAFKYFDTTIDRKRYTSTKEV | |
| | LDATLIHQSITGLYETRIDLSQLGGD | |
| Cas9 nickase | MDKKYSIGLAIGTNSVGWAVITDEYKVPSKKFKVLGNTDRHSIKKNLIGALLFDSGETAEA | SEQ ID |
| Streptococcus | TRLKRTARRRYTRRKNRICYLQEIFSNEMAKVDDSFFHRLEESFLVEEDKKHERHPIFGNI | NO: 215 |
| pyogenes | VDEVAYHEKYPTIYHLRKKLVDSTDKADLRLIYLALAHMIKFRGHFLIEGDLNPDNSDVDK | |
| Q99ZW2 Cas9 | LFIQLVQTYNQLFEENPINASGVDAKAILSARLSKSRRLENLIAQLPGEKKNGLFGNLIAL | |
| with D10A | SLGLTPNFKSNFDLAEDAKLQLSKDTYDDDLDNLLAQIGDQYADLFLAAKNLSDAILLSDI | |
| | LRVNTEITKAPLSASMIKRYDEHHQDLTLLKALVRQQLPEKYKEIFFDQSKNGYAGYIDGG | |
| | ASQEEFYKFIKPILEKMDGTEELLVKLNREDLLRKQRTFDNGSIPHQIHLGELHAILRRQE | |
| | DFYPFLKDNREKIEKILTFRIPYYVGPLARGNSRFAWMTRKSEETITPWNFEEVVDKGASA | |
| | QSFIERMTNFDKNLPNEKVLPKHSLLYEYFTVYNELTKVKYVTEGMRKPAFLSGEQKKAIV | |
| | DLLFKTNRKVTVKQLKEDYFKKIECFDSVEISGVEDRFNASLGTYHDLLKIIKDKDFLDNE | |
| | ENEDILEDIVLTLTLFEDREMIEERLKTYAHLFDDKVMKQLKRRRYTGWGRLSRKLINGIR | |
| | DKQSGKTILDFLKSDGFANRNFMQLIHDDSLTFKEDIQKAQVSGQGDSLHEHIANLAGSPA | |
| | IKKGILQTVKVVDELVKVMGRHKPENIVIEMARENQTTQKGQKNSRERMKRIEEGIKELGS | |
| | QILKEHPVENTQLQNEKLYLYYLQNGRDMYVDQELDINRLSDYDVDHIVPQSFLKDDSIDN | |
| | KVLTRSDKNRGKSDNVPSEEVVKKMKNYWRQLLNAKLITQRKFDNLTKAERGGLSELDKAG | |
| | FIKRQLVETRQITKHVAQILDSRMNTKYDENDKLIREVKVITLKSKLVSDFRKDFQFYKVR | |
| | EINNYHHAHDAYLNAVVGTALIKKYPKLESEFVYGDYKVYDVRKMIAKSEQEIGKATAKYF | |
| | FYSNIMNFFKTEITLANGEIRKRPLIETNGETGEIVWDKGRDFATVRKVLSMPQVNIVKKT | |
| | EVQTGGFSKESILPKRNSDKLIARKKDWDPKKYGGFDSPTVAYSVLVVAKVEKGKSKKLKS | |
| | VKELLGITIMERSSFEKNPIDFLEAKGYKEVKKDLIIKLPKYSLFELENGRKRMLASAGEL | |
| | QKGNELALPSKYVNFLYLASHYEKLKGSPEDNEQKQLFVEQHKHYLDEIIEQISEFSKRVI | |
| | LADANLDKVLSAYNKHRDKPIREQAENIIHLFTLTNLGAPAAFKYFDTTIDRKRYTSTKEV | |
| | LDATLIHQSITGLYETRIDLSQLGGD | |
| Cas9 nickase | MDKKYSIGLDIGTNSVGWAVITDEYKVPSKKFKVLGNTDRHSIKKNLIGALLFDSGETAEA | SEQ ID |
| Streptococcus | TRLKRTARRRYTRRKNRICYLQEIFSNEMAKVDDSFFHRLEESFLVEEDKKHERHPIFGNI | NO: 26 |
| pyogenes | VDEVAYHEKYPTIYHLRKKLVDSTDKADLRLIYLALAHMIKFRGHFLIEGDLNPDNSDVDK | |
| Q99ZW2 Cas9 | LFIQLVQTYNQLFEENPINASGVDAKAILSARLSKSRRLENLIAQLPGEKKNGLFGNLIAL | |
| with E762A | SLGLTPNFKSNFDLAEDAKLQLSKDTYDDDLDNLLAQIGDQYADLFLAAKNLSDAILLSDI | |
| | LRVNTEITKAPLSASMIKRYDEHHQDLTLLKALVRQQLPEKYKEIFFDQSKNGYAGYIDGG | |
| | ASQEEFYKFIKPILEKMDGTEELLVKLNREDLLRKQRTFDNGSIPHQIHLGELHAILRRQE | |
| | DFYPFLKDNREKIEKILTFRIPYYVGPLARGNSRFAWMTRKSEETITPWNFEEVVDKGASA | |
| | QSFIERMTNFDKNLPNEKVLPKHSLLYEYFTVYNELTKVKYVTEGMRKPAFLSGEQKKAIV | |
| | DLLFKTNRKVTVKQLKEDYFKKIECFDSVEISGVEDRFNASLGTYHDLLKIIKDKDFLDNE | |
| | ENEDILEDIVLTLTLFEDREMIEERLKTYAHLFDDKVMKQLKRRRYTGWGRLSRKLINGIR | |
| | DKQSGKTILDFLKSDGFANRNFMQLIHDDSLTFKEDIQKAQVSGQGDSLHEHIANLAGSPA | |
| | IKKGILQTVKVVDELVKVMGRHKPENIVIAMARENQTTQKGQKNSRERMKRIEEGIKELGS | |
| | QILKEHPVENTQLQNEKLYLYYLQNGRDMYVDQELDINRLSDYDVDHIVPQSFLKDDSIDN | |
| | KVLTRSDKNRGKSDNVPSEEVVKKMKNYWRQLLNAKLITQRKFDNLTKAERGGLSELDKAG | |
| | FIKRQLVETRQITKHVAQILDSRMNTKYDENDKLIREVKVITLKSKLVSDFRKDFQFYKVR | |
| | EINNYHHAHDAYLNAVVGTALIKKYPKLESEFVYGDYKVYDVRKMIAKSEQEIGKATAKYF | |
| | FYSNIMNFFKTEITLANGEIRKRPLIETNGETGEIVWDKGRDFATVRKVLSMPQVNIVKKT | |
| | EVQTGGFSKESILPKRNSDKLIARKKDWDPKKYGGFDSPTVAYSVLVVAKVEKGKSKKLKS | |
| | VKELLGITIMERSSFEKNPIDFLEAKGYKEVKKDLIIKLPKYSLFELENGRKRMLASAGEL | |
| | QKGNELALPSKYVNFLYLASHYEKLKGSPEDNEQKQLFVEQHKHYLDEIIEQISEFSKRVI | |
| | LADANLDKVLSAYNKHRDKPIREQAENIIHLFTLTNLGAPAAFKYFDTTIDRKRYTSTKEV | |
| | LDATLIHQSITGLYETRIDLSQLGGD | |
| Cas9 nickase | MDKKYSIGLDIGTNSVGWAVITDEYKVPSKKFKVLGNTDRHSIKKNLIGALLFDSGETAEA | SEQ ID |
| Streptococcus | TRLKRTARRRYTRRKNRICYLQEIFSNEMAKVDDSFFHRLEESFLVEEDKKHERHPIFGNI | NO: 27 |
| pyogenes | VDEVAYHEKYPTIYHLRKKLVDSTDKADLRLIYLALAHMIKFRGHFLIEGDLNPDNSDVDK | |
| Q99ZW2 Cas9 | LFIQLVQTYNQLFEENPINASGVDAKAILSARLSKSRRLENLIAQLPGEKKNGLFGNLIAL | |
| with H983A | SLGLTPNFKSNFDLAEDAKLQLSKDTYDDDLDNLLAQIGDQYADLFLAAKNLSDAILLSDI | |
| | LRVNTEITKAPLSASMIKRYDEHHQDLTLLKALVRQQLPEKYKEIFFDQSKNGYAGYIDGG | |
| | ASQEEFYKFIKPILEKMDGTEELLVKLNREDLLRKQRTFDNGSIPHQIHLGELHAILRRQE | |
| | DFYPFLKDNREKIEKILTFRIPYYVGPLARGNSRFAWMTRKSEETITPWNFEEVVDKGASA | |
| | QSFIERMTNFDKNLPNEKVLPKHSLLYEYFTVYNELTKVKYVTEGMRKPAFLSGEQKKAIV | |
| | DLLFKTNRKVTVKQLKEDYFKKIECFDSVEISGVEDRFNASLGTYHDLLKIIKDKDFLDNE | |
| | ENEDILEDIVLTLTLFEDREMIEERLKTYAHLFDDKVMKQLKRRRYTGWGRLSRKLINGIR | |
| | DKQSGKTILDFLKSDGFANRNFMQLIHDDSLTFKEDIQKAQVSGQGDSLHEHIANLAGSPA | |
| | IKKGILQTVKVVDELVKVMGRHKPENIVIEMARENQTTQKGQKNSRERMKRIEEGIKELGS | |
| | QILKEHPVENTQLQNEKLYLYYLQNGRDMYVDQELDINRLSDYDVDHIVPQSFLKDDSIDN | |
| | KVLTRSDKNRGKSDNVPSEEVVKKMKNYWRQLLNAKLITQRKFDNLTKAERGGLSELDKAG | |
| | FIKRQLVETRQITKHVAQILDSRMNTKYDENDKLIREVKVITLKSKLVSDFRKDFQFYKVR | |
| | EINNYHAAHDAYLNAVVGTALIKKYPKLESEFVYGDYKVYDVRKMIAKSEQEIGKATAKYF | |
| | FYSNIMNFFKTEITLANGEIRKRPLIETNGETGEIVWDKGRDFATVRKVLSMPQVNIVKKT | |
| | EVQTGGFSKESILPKRNSDKLIARKKDWDPKKYGGFDSPTVAYSVLVVAKVEKGKSKKLKS | |
| | VKELLGITIMERSSFEKNPIDFLEAKGYKEVKKDLIIKLPKYSLFELENGRKRMLASAGEL | |
| | QKGNELALPSKYVNFLYLASHYEKLKGSPEDNEQKQLFVEQHKHYLDEIIEQISEFSKRVI | |
| | LADANLDKVLSAYNKHRDKPIREQAENIIHLFTLTNLGAPAAFKYFDTTIDRKRYTSTKEV | |
| | LDATLIHQSITGLYETRIDLSQLGGD | |
| Cas9 nickase | MDKKYSIGLDIGTNSVGWAVITDEYKVPSKKFKVLGNTDRHSIKKNLIGALLFDSGETAEA | SEQ ID |
| Streptococcus | TRLKRTARRRYTRRKNRICYLQEIFSNEMAKVDDSFFHRLEESFLVEEDKKHERHPIFGNI | NO: 28 |
| pyogenes | VDEVAYHEKYPTIYHLRKKLVDSTDKADLRLIYLALAHMIKFRGHFLIEGDLNPDNSDVDK | |
| Q99ZW2 Cas9 | LFIQLVQTYNQLFEENPINASGVDAKAILSARLSKSRRLENLIAQLPGEKKNGLFGNLIAL | |
| with D986A | SLGLTPNFKSNFDLAEDAKLQLSKDTYDDDLDNLLAQIGDQYADLFLAAKNLSDAILLSDI | |
| | LRVNTEITKAPLSASMIKRYDEHHQDLTLLKALVRQQLPEKYKEIFFDQSKNGYAGYIDGG | |
| | ASQEEFYKFIKPILEKMDGTEELLVKLNREDLLRKQRTFDNGSIPHQIHLGELHAILRRQE | |
| | DFYPFLKDNREKIEKILTFRIPYYVGPLARGNSRFAWMTRKSEETITPWNFEEVVDKGASA | |
| | QSFIERMTNFDKNLPNEKVLPKHSLLYEYFTVYNELTKVKYVTEGMRKPAFLSGEQKKAIV | |
| | DLLFKTNRKVTVKQLKEDYFKKIECFDSVEISGVEDRFNASLGTYHDLLKIIKDKDFLDNE | |
| | ENEDILEDIVLTLTLFEDREMIEERLKTYAHLFDDKVMKQLKRRRYTGWGRLSRKLINGIR | |
| | DKQSGKTILDFLKSDGFANRNFMQLIHDDSLTFKEDIQKAQVSGQGDSLHEHIANLAGSPA | |
| | IKKGILQTVKVVDELVKVMGRHKPENIVIEMARENQTTQKGQKNSRERMKRIEEGIKELGS | |
| | QILKEHPVENTQLQNEKLYLYYLQNGRDMYVDQELDINRLSDYDVDHIVPQSFLKDDSIDN | |
| | KVLTRSDKNRGKSDNVPSEEVVKKMKNYWRQLLNAKLITQRKFDNLTKAERGGLSELDKAG | |
| | FIKRQLVETRQITKHVAQILDSRMNTKYDENDKLIREVKVITLKSKLVSDFRKDFQFYKVR | |
| | EINNYHHAHAAYLNAVVGTALIKKYPKLESEFVYGDYKVYDVRKMIAKSEQEIGKATAKYF | |
| | FYSNIMNFFKTEITLANGEIRKRPLIETNGETGEIVWDKGRDFATVRKVLSMPQVNIVKKT | |
| | EVQTGGFSKESILPKRNSDKLIARKKDWDPKKYGGFDSPTVAYSVLVVAKVEKGKSKKLKS | |
| | VKELLGITIMERSSFEKNPIDFLEAKGYKEVKKDLIIKLPKYSLFELENGRKRMLASAGEL | |
| | QKGNELALPSKYVNFLYLASHYEKLKGSPEDNEQKQLFVEQHKHYLDEIIEQISEFSKRVI | |
| | LADANLDKVLSAYNKHRDKPIREQAENIIHLFTLTNLGAPAAFKYFDTTIDRKRYTSTKEV | |
| | LDATLIHQSITGLYETRIDLSQLGGD | |
| Cas9 nickase | MGKRNYILGLAIGITSVGYGIIDYETRDVIDAGVRLFKEANVENNEGRRSKRGARRLKRRR | SEQ ID |
| Staphylococcus | RHRIQRVKKLLFDYNLLTDHSELSGINPYEARVKGLSQKLSEEEFSAALLHLAKRRGVHNV | NO: 29 |
| aureus | NEVEEDTGNELSTKEQISRNSKALEEKYVAELQLERLKKDGEVRGSINRFKTSDYVKEAKQ | |
| (SaCas9) | LLKVQKAYHQLDQSFIDTYIDLLETRRTYYEGPGEGSPFGWKDIKEWYEMLMGHCTYFPEE | |
| with D10A | LRSVKYAYNADLYNALNDLNNLVITRDENEKLEYYEKFQIIENVFKQKKKPTLKQIAKEIL | |
| | VNEEDIKGYRVTSTGKPEFTNLKVYHDIKDITARKEIIENAELLDQIAKILTIYQSSEDIQ | |
| | EELTNLNSELTQEEIEQISNLKGYTGTHNLSLKAINLILDELWHTNDNQIAIFNRLKLVPK | |
| | KVDLSQQKEIPTTLVDDFILSPVVKRSFIQSIKVINAIIKKYGLPNDIIIELAREKNSKDA | |
| | QKMINEMQKRNRQTNERIEEIIRTTGKENAKYLIEKIKLHDMQEGKCLYSLEAIPLEDLLN | |
| | NPFNYEVDHIIPRSVSFDNSFNNKVLVKQEENSKKGNRTPFQYLSSSDSKISYETFKKHIL | |
| | NLAKGKGRISKTKKEYLLEERDINRFSVQKDFINRNLVDTRYATRGLMNLLRSYFRVNNLD | |
| | VKVKSINGGFTSFLRRKWKFKKERNKGYKHHAEDALIIANADFIFKEWKKLDKAKKVMENQ | |
| | MFEEKQAESMPEIETEQEYKEIFITPHQIKHIKDFKDYKYSHRVDKKPNRKLINDTLYSTR | |
| | KDDKGNTLIVNNLNGLYDKDNDKLKKLINKSPEKLLMYHHDPQTYQKLKLIMEQYGDEKNP | |
| | LYKYYEETGNYLTKYSKKDNGPVIKKIKYYGNKLNAHLDITDDYPNSRNKVVKLSLKPYRF | |
| | DVYLDNGVYKFVTVKNLDVIKKENYYEVNSKCYEEAKKLKKISNQAEFIASFYKNDLIKIN | |
| | GELYRVIGVNNDLLNRIEVNMIDITYREYLENMNDKRPPHIIKTIASKTQSIKKYSTDILG | |
| | NLYEVKSKKHPQIIKK | |

[0200] In another embodiment, the Cas9 nickase comprises a mutation in the HNH domain which inactivates the HNH nuclease activity. For example, mutations in histidine (H) 840 or asparagine (R) 863 have been reported as loss-of-function mutations of the HNH nuclease domain and the creation of a functional Cas9 nickase (e.g., Nishimasu et al., “Crystal structure of Cas9 in complex with guide RNA and target DNA,” Cell 156(5), 935-949, which is incorporated herein by reference). Thus, nickase mutations in the HNH domain could include H840X and R863X, wherein X is any amino acid other than the wild type amino acid. In certain embodiments, the nickase could be H840A or R863A or a combination thereof.

[0201] In various embodiments, the Cas9 nickase can have a mutation in the HNH nuclease domain and have one of the following amino acid sequences, or a variant thereof having an amino acid sequence that has at least 80%, at least 85%, at least 90%, at least 95%, or at least 99% sequence identity thereto.

| | | SEQ ID |
|---|---|---|
| Description | Sequence | NO: |
| Cas9 nickase | MDKKYSIGLDIGTNSVGWAVITDEYKVPSKKFKVLGNTDRHSIKKNLIGALLFDSGETAEA | SEQ ID |
| Streptococcus | TRLKRTARRRYTRRKNRICYLQEIFSNEMAKVDDSFFHRLEESFLVEEDKKHERHPIFGNI | NO: 30 |
| pyogenes | VDEVAYHEKYPTIYHLRKKLVDSTDKADLRLIYLALAHMIKFRGHFLIEGDLNPDNSDVDK | |
| Q99ZW2 Cas9 | LFIQLVQTYNQLFEENPINASGVDAKAILSARLSKSRRLENLIAQLPGEKKNGLFGNLIAL | |
| with H840X, | SLGLTPNFKSNFDLAEDAKLQLSKDTYDDDLDNLLAQIGDQYADLFLAAKNLSDAILLSDI | |
| wherein X is | LRVNTEITKAPLSASMIKRYDEHHQDLTLLKALVRQQLPEKYKEIFFDQSKNGYAGYIDGG | |
| any alternate | ASQEEFYKFIKPILEKMDGTEELLVKLNREDLLRKQRTFDNGSIPHQIHLGELHAILRRQE | |
| amino acid | DFYPFLKDNREKIEKILTFRIPYYVGPLARGNSRFAWMTRKSEETITPWNFEEVVDKGASA | |
| | QSFIERMTNFDKNLPNEKVLPKHSLLYEYFTVYNELTKVKYVTEGMRKPAFLSGEQKKAIV | |
| | DLLFKTNRKVTVKQLKEDYFKKIECFDSVEISGVEDRFNASLGTYHDLLKIIKDKDFLDNE | |
| | ENEDILEDIVLTLTLFEDREMIEERLKTYAHLFDDKVMKQLKRRRYTGWGRLSRKLINGIR | |
| | DKQSGKTILDFLKSDGFANRNFMQLIHDDSLTFKEDIQKAQVSGQGDSLHEHIANLAGSPA | |
| | IKKGILQTVKVVDELVKVMGRHKPENIVIEMARENQTTQKGQKNSRERMKRIEEGIKELGS | |
| | QILKEHPVENTQLQNEKLYLYYLQNGRDMYVDQELDINRLSDYDVDXIVPQSFLKDDSIDN | |
| | KVLTRSDKNRGKSDNVPSEEVVKKMKNYWRQLLNAKLITQRKFDNLTKAERGGLSELDKAG | |
| | FIKRQLVETRQITKHVAQILDSRMNTKYDENDKLIREVKVITLKSKLVSDFRKDFQFYKVR | |
| | EINNYHHAHDAYLNAVVGTALIKKYPKLESEFVYGDYKVYDVRKMIAKSEQEIGKATAKYF | |
| | FYSNIMNFFKTEITLANGEIRKRPLIETNGETGEIVWDKGRDFATVRKVLSMPQVNIVKKT | |
| | EVQTGGFSKESILPKRNSDKLIARKKDWDPKKYGGFDSPTVAYSVLVVAKVEKGKSKKLKS | |
| | VKELLGITIMERSSFEKNPIDFLEAKGYKEVKKDLIIKLPKYSLFELENGRKRMLASAGEL | |
| | QKGNELALPSKYVNFLYLASHYEKLKGSPEDNEQKQLFVEQHKHYLDEIIEQISEFSKRVI | |
| | LADANLDKVLSAYNKHRDKPIREQAENIIHLFTLTNLGAPAAFKYFDTTIDRKRYTSTKEV | |
| | LDATLIHQSITGLYETRIDLSQLGGD | |
| Cas9 nickase | MDKKYSIGLDIGTNSVGWAVITDEYKVPSKKFKVLGNTDRHSIKKNLIGALLFDSGETAEA | SEQ ID |
| Streptococcus | TRLKRTARRRYTRRKNRICYLQEIFSNEMAKVDDSFFHRLEESFLVEEDKKHERHPIFGNI | NO: 222 |
| pyogenes | VDEVAYHEKYPTIYHLRKKLVDSTDKADLRLIYLALAHMIKFRGHFLIEGDLNPDNSDVDK | |
| Q99ZW2 Cas9 | LFIQLVQTYNQLFEENPINASGVDAKAILSARLSKSRRLENLIAQLPGEKKNGLFGNLIAL | |
| with H840A | SLGLTPNFKSNFDLAEDAKLQLSKDTYDDDLDNLLAQIGDQYADLFLAAKNLSDAILLSDI | |
| | LRVNTEITKAPLSASMIKRYDEHHQDLTLLKALVRQQLPEKYKEIFFDQSKNGYAGYIDGG | |
| | ASQEEFYKFIKPILEKMDGTEELLVKLNREDLLRKQRTFDNGSIPHQIHLGELHAILRRQE | |
| | DFYPFLKDNREKIEKILTFRIPYYVGPLARGNSRFAWMTRKSEETITPWNFEEVVDKGASA | |
| | QSFIERMTNFDKNLPNEKVLPKHSLLYEYFTVYNELTKVKYVTEGMRKPAFLSGEQKKAIV | |
| | DLLFKTNRKVTVKQLKEDYFKKIECFDSVEISGVEDRFNASLGTYHDLLKIIKDKDFLDNE | |
| | ENEDILEDIVLTLTLFEDREMIEERLKTYAHLFDDKVMKQLKRRRYTGWGRLSRKLINGIR | |
| | DKQSGKTILDFLKSDGFANRNFMQLIHDDSLTFKEDIQKAQVSGQGDSLHEHIANLAGSPA | |
| | IKKGILQTVKVVDELVKVMGRHKPENIVIEMARENQTTQKGQKNSRERMKRIEEGIKELGS | |
| | QILKEHPVENTQLQNEKLYLYYLQNGRDMYVDQELDINRLSDYDVDAIVPQSFLKDDSIDN | |
| | KVLTRSDKNRGKSDNVPSEEVVKKMKNYWRQLLNAKLITQRKFDNLTKAERGGLSELDKAG | |
| | FIKRQLVETRQITKHVAQILDSRMNTKYDENDKLIREVKVITLKSKLVSDFRKDFQFYKVR | |
| | EINNYHHAHDAYLNAVVGTALIKKYPKLESEFVYGDYKVYDVRKMIAKSEQEIGKATAKYF | |
| | FYSNIMNFFKTEITLANGEIRKRPLIETNGETGEIVWDKGRDFATVRKVLSMPQVNIVKKT | |
| | EVQTGGFSKESILPKRNSDKLIARKKDWDPKKYGGFDSPTVAYSVLVVAKVEKGKSKKLKS | |
| | VKELLGITIMERSSFEKNPIDFLEAKGYKEVKKDLIIKLPKYSLFELENGRKRMLASAGEL | |
| | QKGNELALPSKYVNFLYLASHYEKLKGSPEDNEQKQLFVEQHKHYLDEIIEQISEFSKRVI | |
| | LADANLDKVLSAYNKHRDKPIREQAENIIHLFTLTNLGAPAAFKYFDTTIDRKRYTSTKEV | |
| | LDATLIHQSITGLYETRIDLSQLGGD | |
| Cas9 nickase | MDKKYSIGLDIGTNSVGWAVITDEYKVPSKKFKVLGNTDRHSIKKNLIGALLFDSGETAEA | SEQ ID |
| Streptococcus | TRLKRTARRRYTRRKNRICYLQEIFSNEMAKVDDSFFHRLEESFLVEEDKKHERHPIFGNI | NO: 31 |
| pyogenes | VDEVAYHEKYPTIYHLRKKLVDSTDKADLRLIYLALAHMIKFRGHFLIEGDLNPDNSDVDK | |
| Q99ZW2 Cas9 | LFIQLVQTYNQLFEENPINASGVDAKAILSARLSKSRRLENLIAQLPGEKKNGLFGNLIAL | |
| with R863X, | SLGLTPNFKSNFDLAEDAKLQLSKDTYDDDLDNLLAQIGDQYADLFLAAKNLSDAILLSDI | |
| wherein X is | LRVNTEITKAPLSASMIKRYDEHHQDLTLLKALVRQQLPEKYKEIFFDQSKNGYAGYIDGG | |
| any alternate | ASQEEFYKFIKPILEKMDGTEELLVKLNREDLLRKQRTFDNGSIPHQIHLGELHAILRRQE | |
| amino acid | DFYPFLKDNREKIEKILTFRIPYYVGPLARGNSRFAWMTRKSEETITPWNFEEVVDKGASA | |
| | QSFIERMTNFDKNLPNEKVLPKHSLLYEYFTVYNELTKVKYVTEGMRKPAFLSGEQKKAIV | |
| | DLLFKTNRKVTVKQLKEDYFKKIECFDSVEISGVEDRFNASLGTYHDLLKIIKDKDFLDNE | |
| | ENEDILEDIVLTLTLFEDREMIEERLKTYAHLFDDKVMKQLKRRRYTGWGRLSRKLINGIR | |
| | DKQSGKTILDFLKSDGFANRNFMQLIHDDSLTFKEDIQKAQVSGQGDSLHEHIANLAGSPA | |
| | IKKGILQTVKVVDELVKVMGRHKPENIVIEMARENQTTQKGQKNSRERMKRIEEGIKELGS | |
| | QILKEHPVENTQLQNEKLYLYYLQNGRDMYVDQELDINRLSDYDVDHIVPQSFLKDDSIDN | |
| | KVLTRSDKNXGKSDNVPSEEVVKKMKNYWRQLLNAKLITQRKFDNLTKAERGGLSELDKAG | |
| | FIKRQLVETRQITKHVAQILDSRMNTKYDENDKLIREVKVITLKSKLVSDFRKDFQFYKVR | |
| | EINNYHHAHDAYLNAVVGTALIKKYPKLESEFVYGDYKVYDVRKMIAKSEQEIGKATAKYF | |
| | FYSNIMNFFKTEITLANGEIRKRPLIETNGETGEIVWDKGRDFATVRKVLSMPQVNIVKKT | |
| | EVQTGGFSKESILPKRNSDKLIARKKDWDPKKYGGFDSPTVAYSVLVVAKVEKGKSKKLKS | |
| | VKELLGITIMERSSFEKNPIDFLEAKGYKEVKKDLIIKLPKYSLFELENGRKRMLASAGEL | |
| | QKGNELALPSKYVNFLYLASHYEKLKGSPEDNEQKQLFVEQHKHYLDEIIEQISEFSKRVI | |
| | LADANLDKVLSAYNKHRDKPIREQAENIIHLFTLTNLGAPAAFKYFDTTIDRKRYTSTKEV | |
| | LDATLIHQSITGLYETRIDLSQLGGD | |
| Cas9 nickase | MDKKYSIGLDIGTNSVGWAVITDEYKVPSKKFKVLGNTDRHSIKKNLIGALLFDSGETAEA | SEQ ID |
| Streptococcus | TRLKRTARRRYTRRKNRICYLQEIFSNEMAKVDDSFFHRLEESFLVEEDKKHERHPIFGNI | NO: 32 |
| pyogenes | VDEVAYHEKYPTIYHLRKKLVDSTDKADLRLIYLALAHMIKFRGHFLIEGDLNPDNSDVDK | |
| Q99ZW2 Cas9 | LFIQLVQTYNQLFEENPINASGVDAKAILSARLSKSRRLENLIAQLPGEKKNGLFGNLIAL | |
| with R863A, | SLGLTPNFKSNFDLAEDAKLQLSKDTYDDDLDNLLAQIGDQYADLFLAAKNLSDAILLSDI | |
| wherein X is | LRVNTEITKAPLSASMIKRYDEHHQDLTLLKALVRQQLPEKYKEIFFDQSKNGYAGYIDGG | |
| any alternate | ASQEEFYKFIKPILEKMDGTEELLVKLNREDLLRKQRTFDNGSIPHQIHLGELHAILRRQE | |
| amino acid | DFYPFLKDNREKIEKILTFRIPYYVGPLARGNSRFAWMTRKSEETITPWNFEEVVDKGASA | |
| | QSFIERMTNFDKNLPNEKVLPKHSLLYEYFTVYNELTKVKYVTEGMRKPAFLSGEQKKAIV | |
| | DLLFKTNRKVTVKQLKEDYFKKIECFDSVEISGVEDRFNASLGTYHDLLKIIKDKDFLDNE | |
| | ENEDILEDIVLTLTLFEDREMIEERLKTYAHLFDDKVMKQLKRRRYTGWGRLSRKLINGIR | |
| | DKQSGKTILDFLKSDGFANRNFMQLIHDDSLTFKEDIQKAQVSGQGDSLHEHIANLAGSPA | |
| | IKKGILQTVKVVDELVKVMGRHKPENIVIEMARENQTTQKGQKNSRERMKRIEEGIKELGS | |
| | QILKEHPVENTQLQNEKLYLYYLQNGRDMYVDQELDINRLSDYDVDHIVPQSFLKDDSIDN | |
| | KVLTRSDKNAGKSDNVPSEEVVKKMKNYWRQLLNAKLITQRKFDNLTKAERGGLSELDKAG | |
| | FIKRQLVETRQITKHVAQILDSRMNTKYDENDKLIREVKVITLKSKLVSDFRKDFQFYKVR | |
| | EINNYHHAHDAYLNAVVGTALIKKYPKLESEFVYGDYKVYDVRKMIAKSEQEIGKATAKYF | |
| | FYSNIMNFFKTEITLANGEIRKRPLIETNGETGEIVWDKGRDFATVRKVLSMPQVNIVKKT | |
| | EVQTGGFSKESILPKRNSDKLIARKKDWDPKKYGGFDSPTVAYSVLVVAKVEKGKSKKLKS | |
| | VKELLGITIMERSSFEKNPIDFLEAKGYKEVKKDLIIKLPKYSLFELENGRKRMLASAGEL | |
| | QKGNELALPSKYVNFLYLASHYEKLKGSPEDNEQKQLFVEQHKHYLDEIIEQISEFSKRVI | |
| | LADANLDKVLSAYNKHRDKPIREQAENIIHLFTLTNLGAPAAFKYFDTTIDRKRYTSTKEV | |
| | LDATLIHQSITGLYETRIDLSQLGGD | |

[0202] In some embodiments, the N-terminal methionine is removed from a Cas9 nickase, or from any Cas9 variant, ortholog, or equivalent disclosed or contemplated herein. For example, methionine-minus Cas9 nickases include the following sequences, or a variant thereof having an amino acid sequence that has at least 80%, at least 85%, at least 90%, at least 95%, or at least 99% sequence identity thereto.

| Description | Sequence |
|---|---|
| Cas9 nickase | DKKYSIGLDIGTNSVGWAVITDEYKVPSKKFKVLGNTDRHSIKKNLIGALLFDSGETAEATRLKRTARRRYTRRK |
| (Met minus) | NRICYLQEIFSNEMAKVDDSFFHRLEESFLVEEDKKHERHPIFGNIVDEVAYHEKYPTIYHLRKKLVDSTDKADL |
| Streptococcus | RLIYLALAHMIKFRGHFLIEGDLNPDNSDVDKLFIQLVQTYNQLFEENPINASGVDAKAILSARLSKSRRLENLI |
| pyogenes | AQLPGEKKNGLFGNLIALSLGLTPNFKSNFDLAEDAKLQLSKDTYDDDLDNLLAQIGDQYADLFLAAKNLSDAIL |
| Q99ZW2 Cas9 | LSDILRVNTEITKAPLSASMIKRYDEHHQDLTLLKALVRQQLPEKYKEIFFDQSKNGYAGYIDGGASQEEFYKFI |
| with H840X, | KPILEKMDGTEELLVKLNREDLLRKQRTFDNGSIPHQIHLGELHAILRRQEDFYPFLKDNREKIEKILTFRIPYY |
| wherein X is | VGPLARGNSRFAWMTRKSEETITPWNFEEVVDKGASAQSFIERMTNFDKNLPNEKVLPKHSLLYEYFTVYNELTK |
| any alternate | VKYVTEGMRKPAFLSGEQKKAIVDLLFKTNRKVTVKQLKEDYFKKIECFDSVEISGVEDRFNASLGTYHDLLKII |
| amino acid | KDKDFLDNEENEDILEDIVLTLTLFEDREMIEERLKTYAHLFDDKVMKQLKRRRYTGWGRLSRKLINGIRDKQSG |
| | KTILDFLKSDGFANRNFMQLIHDDSLTFKEDIQKAQVSGQGDSLHEHIANLAGSPAIKKGILQTVKVVDELVKVM |
| | GRHKPENIVIEMARENQTTQKGQKNSRERMKRIEEGIKELGSQILKEHPVENTQLQNEKLYLYYLQNGRDMYVDQ |
| | ELDINRLSDYDVDXIVPQSFLKDDSIDNKVLTRSDKNRGKSDNVPSEEVVKKMKNYWRQLLNAKLITQRKFDNLT |
| | KAERGGLSELDKAGFIKRQLVETRQITKHVAQILDSRMNTKYDENDKLIREVKVITLKSKLVSDFRKDFQFYKVR |
| | EINNYHHAHDAYLNAVVGTALIKKYPKLESEFVYGDYKVYDVRKMIAKSEQEIGKATAKYFFYSNIMNFFKTEIT |
| | LANGEIRKRPLIETNGETGEIVWDKGRDFATVRKVLSMPQVNIVKKTEVQTGGFSKESILPKRNSDKLIARKKDW |
| | DPKKYGGFDSPTVAYSVLVVAKVEKGKSKKLKSVKELLGITIMERSSFEKNPIDFLEAKGYKEVKKDLIIKLPKY |
| | SLFELENGRKRMLASAGELQKGNELALPSKYVNFLYLASHYEKLKGSPEDNEQKQLFVEQHKHYLDEIIEQISEF |
| | SKRVILADANLDKVLSAYNKHRDKPIREQAENIIHLFTLTNLGAPAAFKYFDTTIDRKRYTSTKEVLDATLIHQS |
| | ITGLYETRIDLSQLGGD (SEQ ID NO: 33) |
| Cas9 nickase | DKKYSIGLDIGTNSVGWAVITDEYKVPSKKFKVLGNTDRHSIKKNLIGALLFDSGETAEATRLKRTARRRYTRRK |
| (Met minus) | NRICYLQEIFSNEMAKVDDSFFHRLEESFLVEEDKKHERHPIFGNIVDEVAYHEKYPTIYHLRKKLVDSTDKADL |
| Streptococcus | RLIYLALAHMIKFRGHFLIEGDLNPDNSDVDKLFIQLVQTYNQLFEENPINASGVDAKAILSARLSKSRRLENLI |
| pyogenes | AQLPGEKKNGLFGNLIALSLGLTPNFKSNFDLAEDAKLQLSKDTYDDDLDNLLAQIGDQYADLFLAAKNLSDAIL |
| Q99ZW2 Cas9 | LSDILRVNTEITKAPLSASMIKRYDEHHQDLTLLKALVRQQLPEKYKEIFFDQSKNGYAGYIDGGASQEEFYKFI |
| with H840A, | KPILEKMDGTEELLVKLNREDLLRKQRTFDNGSIPHQIHLGELHAILRRQEDFYPFLKDNREKIEKILTFRIPYY |
| wherein X is | VGPLARGNSRFAWMTRKSEETITPWNFEEVVDKGASAQSFIERMTNFDKNLPNEKVLPKHSLLYEYFTVYNELTK |
| any alternate | VKYVTEGMRKPAFLSGEQKKAIVDLLFKTNRKVTVKQLKEDYFKKIECFDSVEISGVEDRFNASLGTYHDLLKII |
| amino acid | KDKDFLDNEENEDILEDIVLTLTLFEDREMIEERLKTYAHLFDDKVMKQLKRRRYTGWGRLSRKLINGIRDKQSG |
| | KTILDFLKSDGFANRNFMQLIHDDSLTFKEDIQKAQVSGQGDSLHEHIANLAGSPAIKKGILQTVKVVDELVKVM |
| | GRHKPENIVIEMARENQTTQKGQKNSRERMKRIEEGIKELGSQILKEHPVENTQLQNEKLYLYYLQNGRDMYVDQ |
| | ELDINRLSDYDVDAIVPQSFLKDDSIDNKVLTRSDKNRGKSDNVPSEEVVKKMKNYWRQLLNAKLITQRKFDNLT |
| | KAERGGLSELDKAGFIKRQLVETRQITKHVAQILDSRMNTKYDENDKLIREVKVITLKSKLVSDFRKDFQFYKVR |
| | EINNYHHAHDAYLNAVVGTALIKKYPKLESEFVYGDYKVYDVRKMIAKSEQEIGKATAKYFFYSNIMNFFKTEIT |
| | LANGEIRKRPLIETNGETGEIVWDKGRDFATVRKVLSMPQVNIVKKTEVQTGGFSKESILPKRNSDKLIARKKDW |
| | DPKKYGGFDSPTVAYSVLVVAKVEKGKSKKLKSVKELLGITIMERSSFEKNPIDFLEAKGYKEVKKDLIIKLPKY |
| | SLFELENGRKRMLASAGELQKGNELALPSKYVNFLYLASHYEKLKGSPEDNEQKQLFVEQHKHYLDEIIEQISEF |
| | SKRVILADANLDKVLSAYNKHRDKPIREQAENIIHLFTLTNLGAPAAFKYFDTTIDRKRYTSTKEVLDATLIHQS |
| | ITGLYETRIDLSQLGGD (SEQ ID NO: 34) |
| Cas9 nickase | DKKYSIGLDIGTNSVGWAVITDEYKVPSKKFKVLGNTDRHSIKKNLIGALLFDSGETAEATRLKRTARRRYTRRK |
| (Met minus) | NRICYLQEIFSNEMAKVDDSFFHRLEESFLVEEDKKHERHPIFGNIVDEVAYHEKYPTIYHLRKKLVDSTDKADL |
| Streptococcus | RLIYLALAHMIKFRGHFLIEGDLNPDNSDVDKLFIQLVQTYNQLFEENPINASGVDAKAILSARLSKSRRLENLI |
| pyogenes | AQLPGEKKNGLFGNLIALSLGLTPNFKSNFDLAEDAKLQLSKDTYDDDLDNLLAQIGDQYADLFLAAKNLSDAIL |
| Q99ZW2 Cas9 | LSDILRVNTEITKAPLSASMIKRYDEHHQDLTLLKALVRQQLPEKYKEIFFDQSKNGYAGYIDGGASQEEFYKFI |
| with R863X, | KPILEKMDGTEELLVKLNREDLLRKQRTFDNGSIPHQIHLGELHAILRRQEDFYPFLKDNREKIEKILTFRIPYY |
| wherein X is | VGPLARGNSRFAWMTRKSEETITPWNFEEVVDKGASAQSFIERMTNFDKNLPNEKVLPKHSLLYEYFTVYNELTK |
| any alternate | VKYVTEGMRKPAFLSGEQKKAIVDLLFKTNRKVTVKQLKEDYFKKIECFDSVEISGVEDRFNASLGTYHDLLKII |
| amino acid | KDKDFLDNEENEDILEDIVLTLTLFEDREMIEERLKTYAHLFDDKVMKQLKRRRYTGWGRLSRKLINGIRDKQSG |
| | KTILDFLKSDGFANRNFMQLIHDDSLTFKEDIQKAQVSGQGDSLHEHIANLAGSPAIKKGILQTVKVVDELVKVM |
| | GRHKPENIVIEMARENQTTQKGQKNSRERMKRIEEGIKELGSQILKEHPVENTQLQNEKLYLYYLQNGRDMYVDQ |
| | ELDINRLSDYDVDHIVPQSFLKDDSIDNKVLTRSDKNXGKSDNVPSEEVVKKMKNYWRQLLNAKLITQRKFDNLT |
| | KAERGGLSELDKAGFIKRQLVETRQITKHVAQILDSRMNTKYDENDKLIREVKVITLKSKLVSDFRKDFQFYKVR |
| | EINNYHHAHDAYLNAVVGTALIKKYPKLESEFVYGDYKVYDVRKMIAKSEQEIGKATAKYFFYSNIMNFFKTEIT |
| | LANGEIRKRPLIETNGETGEIVWDKGRDFATVRKVLSMPQVNIVKKTEVQTGGFSKESILPKRNSDKLIARKKDW |
| | DPKKYGGFDSPTVAYSVLVVAKVEKGKSKKLKSVKELLGITIMERSSFEKNPIDFLEAKGYKEVKKDLIIKLPKY |
| | SLFELENGRKRMLASAGELQKGNELALPSKYVNFLYLASHYEKLKGSPEDNEQKQLFVEQHKHYLDEIIEQISEF |
| | SKRVILADANLDKVLSAYNKHRDKPIREQAENIIHLFTLTNLGAPAAFKYFDTTIDRKRYTSTKEVLDATLIHQS |
| | ITGLYETRIDLSQLGGD(SEQ ID NO: 35) |
| Cas9 nickase | DKKYSIGLDIGTNSVGWAVITDEYKVPSKKFKVLGNTDRHSIKKNLIGALLFDSGETAEATRLKRTARRRYTRRK |
| (Met minus) | NRICYLQEIFSNEMAKVDDSFFHRLEESFLVEEDKKHERHPIFGNIVDEVAYHEKYPTIYHLRKKLVDSTDKADL |
| Streptococcus | RLIYLALAHMIKFRGHFLIEGDLNPDNSDVDKLFIQLVQTYNQLFEENPINASGVDAKAILSARLSKSRRLENLI |
| pyogenes | AQLPGEKKNGLFGNLIALSLGLTPNFKSNFDLAEDAKLQLSKDTYDDDLDNLLAQIGDQYADLFLAAKNLSDAIL |
| Q99ZW2 Cas9 | LSDILRVNTEITKAPLSASMIKRYDEHHQDLTLLKALVRQQLPEKYKEIFFDQSKNGYAGYIDGGASQEEFYKFI |
| with R863A, | KPILEKMDGTEELLVKLNREDLLRKQRTFDNGSIPHQIHLGELHAILRRQEDFYPFLKDNREKIEKILTFRIPYY |
| wherein X is | VGPLARGNSRFAWMTRKSEETITPWNFEEVVDKGASAQSFIERMTNFDKNLPNEKVLPKHSLLYEYFTVYNELTK |
| any alternate | VKYVTEGMRKPAFLSGEQKKAIVDLLFKTNRKVTVKQLKEDYFKKIECFDSVEISGVEDRFNASLGTYHDLLKII |
| amino acid | KDKDFLDNEENEDILEDIVLTLTLFEDREMIEERLKTYAHLFDDKVMKQLKRRRYTGWGRLSRKLINGIRDKQSG |
| | KTILDFLKSDGFANRNFMQLIHDDSLTFKEDIQKAQVSGQGDSLHEHIANLAGSPAIKKGILQTVKVVDELVKVM |
| | GRHKPENIVIEMARENQTTQKGQKNSRERMKRIEEGIKELGSQILKEHPVENTQLQNEKLYLYYLQNGRDMYVDQ |
| | ELDINRLSDYDVDHIVPQSFLKDDSIDNKVLTRSDKNAGKSDNVPSEEVVKKMKNYWRQLLNAKLITQRKFDNLT |
| | KAERGGLSELDKAGFIKRQLVETRQITKHVAQILDSRMNTKYDENDKLIREVKVITLKSKLVSDFRKDFQFYKVR |
| | EINNYHHAHDAYLNAVVGTALIKKYPKLESEFVYGDYKVYDVRKMIAKSEQEIGKATAKYFFYSNIMNFFKTEIT |
| | LANGEIRKRPLIETNGETGEIVWDKGRDFATVRKVLSMPQVNIVKKTEVQTGGFSKESILPKRNSDKLIARKKDW |
| | DPKKYGGFDSPTVAYSVLVVAKVEKGKSKKLKSVKELLGITIMERSSFEKNPIDFLEAKGYKEVKKDLIIKLPKY |
| | SLFELENGRKRMLASAGELQKGNELALPSKYVNFLYLASHYEKLKGSPEDNEQKQLFVEQHKHYLDEIIEQISEF |
| | SKRVILADANLDKVLSAYNKHRDKPIREQAENIIHLFTLTNLGAPAAFKYFDTTIDRKRYTSTKEVLDATLIHQS |
| | ITGLYETRIDLSQLGGD (SEQ ID NO: 36) |

### Other Cas9 Variants

[0203] The napDNAbp domains used in the base editors described herein may also include other Cas9 variants that area at least about 80% identical, at least about 90% identical, at least about 95% identical, at least about 96% identical, at least about 97% identical, at least about 98% identical, at least about 99% identical, at least about 99.5% identical, or at least about 99.9% identical to any reference Cas9 protein, including any wild type Cas9, or mutant Cas9 (e.g., a dead Cas9 or Cas9 nickase), or circular permutant Cas9, or other variant of Cas9 disclosed herein or known in the art. In some embodiments, a Cas9 variant may have 1, 2, 3, 4, 5, 6, 7, 8, 9, 10, 11, 12, 13, 14, 15, 16, 17, 18, 19, 20, 21, 22, 21, 24, 25, 26, 27, 28, 29, 30, 31, 32, 33, 34, 35, 36, 37, 38, 39, 40, 41, 42, 43, 44, 45, 46, 47, 48, 49, 50, or more amino acid changes compared to a reference Cas9. In some embodiments, the Cas9 variant comprises a fragment of a reference Cas9 (e.g., a gRNA binding domain or a DNA-cleavage domain), such that the fragment is at least about 70% identical, at least about 80% identical, at least about 90% identical, at least about 95% identical, at least about 96% identical, at least about 97% identical, at least about 98% identical, at least about 99% identical, at least about 99.5% identical, or at least about 99.9% identical to the corresponding fragment of wild type Cas9. In some embodiments, the fragment is at least 30%, at least 35%, at least 40%, at least 45%, at least 50%, at least 55%, at least 60%, at least 65%, at least 70%, at least 75%, at least 80%, at least 85%, at least 90%, at least 95%, at least 96%, at least 97%, at least 98%, at least 99%, or at least 99.5% of the amino acid length of a corresponding wild type Cas9 (e.g., SEQ ID NO: 213).

[0204] In some embodiments, the disclosure also may utilize Cas9 fragments which retain their functionality and which are fragments of any herein disclosed Cas9 protein. In some embodiments, the Cas9 fragment is at least 100 amino acids in length. In some embodiments, the fragment is at least 100, 150, 200, 250, 300, 350, 400, 450, 500, 550, 600, 650, 700, 750, 800, 850, 900, 950, 1000, 1050, 1100, 1150, 1200, 1250, or 1300 amino acids in length.

[0205] In various embodiments, the base editors disclosed herein may comprise one of the Cas9 variants described as follows, or a Cas9 variant thereof having at least about 70% identical, at least about 80% identical, at least about 90% identical, at least about 95% identical, at least about 96% identical, at least about 97% identical, at least about 98% identical, at least about 99% identical, at least about 99.5% identical, or at least about 99.9% identical to any reference Cas9 variants.

### Other Cas9 Equivalents

[0206] In some embodiments, the base editors described herein can include any Cas9 equivalent. As used herein, the term “Cas9 equivalent” is a broad term that encompasses any napDNAbp protein that serves the same function as Cas9 in the present base editors despite that its amino acid primary sequence and/or its three-dimensional structure may be different and/or unrelated from an evolutionary standpoint. Thus, while Cas9 equivalents include any Cas9 ortholog, homolog, mutant, or variant described or embraced herein that are evolutionarily related, the Cas9 equivalents also embrace proteins that may have evolved through convergent evolution processes to have the same or similar function as Cas9, but which do not necessarily have any similarity with regard to amino acid sequence and/or three dimensional structure. The base editors described here embrace any Cas9 equivalent that would provide the same or similar function as Cas9 despite that the Cas9 equivalent may be based on a protein that arose through convergent evolution.

[0207] For example, CasX is a Cas9 equivalent that reportedly has the same function as Cas9 but which evolved through convergent evolution. Thus, the CasX protein described in Liu et al., “CasX enzymes comprises a distinct family of RNA-guided genome editors,” Nature, 2019, Vol. 566: 218-223, is contemplated to be used with the base editors described herein. In addition, any variant or modification of CasX is conceivable and within the scope of the present disclosure.

[0208] Cas9 is a bacterial enzyme that evolved in a wide variety of species. However, the Cas9 equivalents contemplated herein may also be obtained from archaea, which constitute a domain and kingdom of single-celled prokaryotic microbes different from bacteria.

[0209] In some embodiments, Cas9 equivalents may refer to CasX or CasY, which have been described in, for example, Burstein et al., “New CRISPR-Cas systems from uncultivated microbes.” Cell Res. 2017 Feb. 21. doi: 10.1038/cr.2017.21, the entire contents of which is hereby incorporated by reference. Using genome-resolved metagenomics, a number of CRISPR-Cas systems were identified, including the first reported Cas9 in the archaeal domain of life. This divergent Cas9 protein was found in little-studied nanoarchaea as part of an active CRISPR-Cas system. In bacteria, two previously unknown systems were discovered, CRISPR-CasX and CRISPR-CasY, which are among the most compact systems yet discovered. In some embodiments, Cas9 refers to CasX, or a variant of CasX. In some embodiments, Cas9 refers to a CasY, or a variant of CasY. It should be appreciated that other RNA-guided DNA binding proteins may be used as a nucleic acid programmable DNA binding protein (napDNAbp), and are within the scope of this disclosure. Also see Liu et al., “CasX enzymes comprises a distinct family of RNA-guided genome editors,” Nature, 2019, Vol. 566: 218-223. Any of these Cas9 equivalents are contemplated.

[0210] In some embodiments, the Cas9 equivalent comprises an amino acid sequence that is at least 85%, at least 90%, at least 91%, at least 92%, at least 93%, at least 94%, at least 95%, at least 96%, at least 97%, at least 98%, at least 99%, or at least 99.5% identical to a naturally-occurring CasX or CasY protein. In some embodiments, the napDNAbp is a naturally-occurring CasX or CasY protein. In some embodiments, the napDNAbp comprises an amino acid sequence that is at least 85%, at least 90%, at least 91%, at least 92%, at least 93%, at least 94%, at least 95%, at least 96%, at least 97%, at least 98%, at least 99%, or at least 99.5% identical to a wild-type Cas moiety or any Cas moiety provided herein.

[0211] In various embodiments, the nucleic acid programmable DNA binding proteins include, without limitation, Cas9 (e.g., dCas9 and nCas9), CasX, CasY, Cpf1, C2c1, C2c2, C2C3, Argonaute, Cas12a, and Cas12b. One example of a nucleic acid programmable DNA-binding protein that has different PAM specificity than Cas9 is Clustered Regularly Interspaced Short Palindromic Repeats from Prevotella and Francisella 1 (Cpf1). Similar to Cas9, Cpf1 is also a class 2 CRISPR effector. It has been shown that Cpf1 mediates robust DNA interference with features distinct from Cas9. Cpf1 is a single RNA-guided endonuclease lacking tracrRNA, and it utilizes a T-rich protospacer-adjacent motif (TTN, TTTN, or YTN). Moreover, Cpf1 cleaves DNA via a staggered DNA double-stranded break. Out of 16 Cpf1-family proteins, two enzymes from Acidaminococcus and Lachnospiraceae are shown to have efficient genome-editing activity in human cells. Cpf1 proteins are known in the art and have been described previously, for example Yamano et al., “Crystal structure of Cpf1 in complex with guide RNA and target DNA.” Cell (165) 2016, p. 949-962; the entire contents of which is hereby incorporated by reference. The state of the art may also now refer to Cpf1 enzymes as Cas12a.

[0212] In still other embodiments, the Cas protein may include any CRISPR associated protein, including but not limited to Cas12a, Cas12b, Cas1, Cas1B, Cas2, Cas3, Cas4, Cas5, Cas6, Cas7, Cas8, Cas9 (sometimes referred to as Csn1 and Csx12), Cas10, Csy1, Csy2, Csy3, Cse1, Cse2, Csc1, Csc2, Csa5, Csn2. Csm2, Csm3, Csm4, Csm5, Csm6, Cmr1, Cmr3, Cmr4, Cmr5, Cmr6, Csb1, Csb2, Csb3, Csx17, Csx14, Csx10, Csx16, CsaX, Csx3, Csx1, Csx15, Csf1, Csf2, Csf3, Csf4, homologs thereof, or modified versions thereof, and preferably comprising a nickase mutation (e.g., a mutation corresponding to the D10A mutation of the wild type SpCas9 polypeptide of SEQ ID NO: 213).

[0213] In various other embodiments, the napDNAbp can be any of the following proteins: a Cas9, a Cpf1, a CasX, a CasY, a C2c1, a C2c2, a C2c3, a GeoCas9, a CjCas9, a Cas12a, a Cas12b, a Cas12g, a Cas12h, a Cas12i, a Cas13b, a Cas13c, a Cas13d, a Cas14, a Csn2, an xCas9, an SpCas9-NG, a circularly permuted Cas9, or an Argonaute (Ago), a Cas9-KKH, a SmacCas9, a Spy-macCas9, an SpCas9-VRQR, an SpCas9-NRRH, an SpaCas9-NRTH, an SpCas9-NRCH, an LbCas12a, an AsCas12a, a CeCas12a, an MbCas12a, Cas3, CasΦ, and circularly permuted Cas9, domains such as CP1012, CP1028, CP1041, CP1249, and CP1300.

[0214] In certain embodiments, the base editors contemplated herein can include a Cas9 protein that is of smaller molecular weight than the canonical SpCas9 sequence. In some embodiments, the smaller-sized Cas9 variants may facilitate delivery to cells, e.g., by an expression vector, nanoparticle, or other means of delivery. The canonical SpCas9 protein is 1368 amino acids in length and has a predicted molecular weight of 158 kilodaltons. The term “small-sized Cas9 variant”, as used herein, refers to any Cas9 variant-naturally occurring, engineered, or otherwise that is less than at least 1300 amino acids, or at least less than 1290 amino acids, or than less than 1280 amino acids, or less than 1270 amino acid, or less than 1260 amino acid, or less than 1250 amino acids, or less than 1240 amino acids, or less than 1230 amino acids, or less than 1220 amino acids, or less than 1210 amino acids, or less than 1200 amino acids, or less than 1190 amino acids, or less than 1180 amino acids, or less than 1170 amino acids, or less than 1160 amino acids, or less than 1150 amino acids, or less than 1140 amino acids, or less than 1130 amino acids, or less than 1120 amino acids, or less than 1110 amino acids, or less than 1100 amino acids, or less than 1050 amino acids, or less than 1000 amino acids, or less than 950 amino acids, or less than 900 amino acids, or less than 850 amino acids, or less than 800 amino acids, or less than 750 amino acids, or less than 700 amino acids, or less than 650 amino acids, or less than 600 amino acids, or less than 550 amino acids, or less than 500 amino acids, but at least larger than about 400 amino acids and retaining the required functions of the Cas9 protein.

[0215] In some embodiments, Cas9 equivalents may refer to a Cas3, which has been described in, Morisaka et al., “CRISPR-Cas3 induces broad and unidirectional genome editing in human cells,” Nature Comm. (2019) 10:5302, which is hereby incorporated by reference. Cas3, which exhibits helicase as well as endonuclease activity, was shown to successfully cleave target sequences in genomic DNA in human cells in vitro.

[0216] In some embodiments, Cas9 equivalents may refer to a CasΦ, which has been described in Pausch et al., Science (2020) 369:6501, 333-337, which is hereby incorporated by reference. CasΦ uses a single active site for both CRISPR RNA (crRNA) processing and crRNA-guided DNA cutting to target foreign nucleic acids, and may have expanded target recognition capabilities relative to other CRISPR-Cas proteins.

[0217] In various embodiments, the base editors disclosed herein may comprise one of the small-sized Cas9 variants described as follows, or a Cas9 variant thereof having at least about 70% identical, at least about 80% identical, at least about 90% identical, at least about 95% identical, at least about 96% identical, at least about 97% identical, at least about 98% identical, at least about 99% identical, at least about 99.5% identical, or at least about 99.9% identical to any reference small-sized Cas9 protein. Exemplary small-sized Cas9 variants include, but are not limited to, SaCas9, LbCas12a, AsCas12a, CeCas12a, and MbCas12a. For instance, Chen et al. recently showed that a novel Cas12a nuclease CeCas12a from Coprococcus eutactus, a napDNAbp with editing efficiencies comparable to AsCas12a and LbCas12a in human cells, Moreover, had higher stringenices for PAM recognition in vitro and in vivo followed by very low off-target editing rates in cells. Importantly, CeCas12a rendered less off-target edits located at C-containing PAM at multiple sites compared to LbCas12a and AsCas12a, as assessed by targeted sequencing methods. See Chen et al., Genome Biol. 2020; 21:78, herein incorporated by reference.

[0218] In some embodiments, the base editors described herein may also comprise Cas12a/Cpf1 (dCpf1) variants that may be used as a guide nucleotide sequence-programmable DNA-binding protein domain. The Cas12a/Cpf1 protein has a RuvC-like endonuclease domain that is similar to the RuvC domain of Cas9 but does not have an HNH endonuclease domain, and the N-terminal of Cpf1 does not have the alpha-helical recognition lobe of Cas9. It was shown in Zetsche et al., Cell, 163, 759-771, 2015 (which is incorporated herein by reference) that, the RuvC-like domain of Cpf1 is responsible for cleaving both DNA strands and inactivation of the RuvC-like domain inactivates Cpf1 nuclease activity.

[0219] In some embodiments, the nucleic acid programmable DNA binding protein (napDNAbp) of any of the CBEs provided herein may be a C2c1, a C2c2, or a C2c3 protein. In some embodiments, the napDNAbp is a C2c1 protein. In some embodiments, the napDNAbp is a C2c2 protein. In some embodiments, the napDNAbp is a C2c3 protein. In some embodiments, the napDNAbp comprises an amino acid sequence that is at least 85%, at least 90%, at least 91%, at least 92%, at least 93%, at least 94%, at least 95%, at least 96%, at least 97%, at least 98%, at least 99%, or at least 99.5% identical to a naturally-occurring C2c1, C2c2, or C2c3 protein. In some embodiments, the napDNAbp is a naturally-occurring C2c1, C2c2, or C2c3 protein. In some embodiments, the napDNAbp comprises an amino acid sequence that is at least 85%, at least 90%, at least 91%, at least 92%, at least 93%, at least 94%, at least 95%, at least 96%, at least 97%, at least 98%, at least 99%, or at least 99.5% identical to one of SEQ ID NOs: 220 or 221. In some embodiments, the napDNAbp comprises an amino acid sequence of SEQ ID NOs: 220 or 221. It should be appreciated that C2c1, C2c2, or C2c3 from other bacterial species may also be used in accordance with the present disclosure.

[0220] In some embodiments, the nucleic acid programmable DNA binding protein (napDNAbp) of any of the CBEs provided herein may be a CjCas9, Cas12a, Cas12b, Cas12g, Cas12h, Cas12i, Cas13b, Cas13c, Cas13d, Cas14, Csn2, and GeoCas9. CjCas9 is described and characterized in Kim et al., Nat Commun. 2017; 8:14500 and Dugar et al., Molecular Cell 2018; 69:893-905, incorporated herein by reference. GeoCas9 is described and characterized in Harrington et al. Nat Commun. 2017; 8(1):1424 and International Publication No. PCT/US2019/58678, filed Oct. 29, 2019, which published as International Publication No. WO 2020/092453 on May 7, 2020, each of incorporated herein by reference. The Cas12a, Cas12b, Cas12g, Cas12h and Cas12i proteins are described and characterized in, e.g., Yan et al., Science, 2019; 363(6422): 88-91, Murugan et al. The Revolution Continues: Newly Discovered Systems Expand the CRISPR-Cas Toolkit, Molecular Cell 2017; 68(1):15-25, each of which are incorporated herein by reference. Cas14 is characterized and described in Harrington et al. Science 2018; 362(6416):839-842, incorporated herein by reference. Cas13b, Cas13c and Cas13d are described and characterized in Smargon et al., Molecular Cell 2017, Cox et al., Science 2017, and Yan et al. Molecular Cell 70, 327-339.e5 (2018), each of which are incorporated herein by reference. Csn2 is described and characterized in Koo Y., Jung D. K., and Bae E. PloS One. 2012; 7:e33401, incorporated herein by reference.

```
C2cl (uniprot.org/uniprot/T0D7A2#)
sp|T0D7A2|C2Cl_ALIAG CRISPR-associated endonuclease
C2c1 OS = Alicyclobacillus acidoterrestris
(strain ATCC 49025/DSM 3922/CIP 106132/NCIMB 13137/GD3B)
GN = c2c1 PE = 1 SV = 1
MAVKSIKVKLRLDDMPEIRAGLWKLHKEVNAGVRYYTEWLSLLRQENLYR
RSPNGDGEQECDKTAEECKAELLERLRARQVENGHRGPAGSDDELLQLAR
QLYELLVPQAIGAKGDAQQIARKFLSPLADKDAVGGLGIAKAGNKPRWVR
MREAGEPGWEEEKEKAETRKSADRTADVLRALADFGLKPLMRVYTDSEMS
SVEWKPLRKGQAVRTWDRDMFQQAIERMMSWESWNQRVGQEYAKLVEQKN
RFEQKNFVGQEHLVHLVNQLQQDMKEASPGLESKEQTAHYVTGRALRGSD
KVFEKWGKLAPDAPFDLYDAEIKNVQRRNTRRFGSHDLFAKLAEPEYQAL
WREDASFLTRYAVYNSILRKLNHAKMFATFTLPDATAHPIWTRFDKLGGN
LHQYTFLFNEFGERRHAIRFHKLLKVENGVAREVDDVTVPISMSEQLDNL
LPRDPNEPIALYFRDYGAEQHFTGEFGGAKIQCRRDQLAHMHRRRGARDV
YLNVSVRVQSQSEARGERRPPYAAVFRLVGDNHRAFVHFDKLSDYLAEHP
DDGKLGSEGLLSGLRVMSVDLGLRTSASISVFRVARKDELKPNSKGRVPF
FFPIKGNDNLVAVHERSQLLKLPGETESKDLRAIREERQRTLRQLRTQLA
YLRLLVRCGSEDVGRRERSWAKLIEQPVDAANHMTPDWREAFENELQKLK
SLHGICSDKEWMDAVYESVRRVWRHMGKQVRDWRKDVRSGERPKIRGYAK
DVVGGNSIEQIEYLERQYKFLKSWSFFGKVSGQVIRAEKGSRFAITLREH
IDHAKEDRLKKLADRIIMEALGYVYALDERGKGKWVAKYPPCQLILLEEL
SEYQFNNDRPPSENNQLMQWSHRGVFQELINQAQVHDLLVGTMYAAFSSR
FDARTGAPGIRCRRVPARCTQEHNPEPFPWWLNKFVVEHTLDACPLRADD
LIPTGEGEIFVSPFSAEEGDFHQIHADLNAAQNLQQRLWSDFDISQIRLR
CDWGEVDGELVLIPRLTGKRTADSYSNKVFYTNTGVTYYERERGKKRRKV
FAQEKLSEEEAELLVEADEAREKSVVLMRDPSGIINRGNWTRQKEFWSMV
NQRIEGYLVKQIRSRVPLQDSACENTGDI
(SEQ ID NO: 220)
  C2c2 (uniprot.org/uniprot/PODOC6)
>SP|P0DOC6|C2C2_LEPSD CRISPR-ASSOCIATED
ENDORIBONUCLEASE C2C2 OS = LEPTOTRICHIA SHAHII
(STRAIN DSM 19757/CCUG 47503/CIP 107916/
JCM 16776/LB37) GN = C2C2 PE = 1 SV = 1
MGNLFGHKRWYEVRDKKDFKIKRKVKVKRNYDGNKYILNINENNNKEKID
NNKFIRKYINYKKNDNILKEFTRKFHAGNILFKLKGKEGIIRIENNDDFL
ETEEVVLYIEAYGKSEKLKALGITKKKIIDEAIRQGITKDDKKIEIKRQE
NEEEIEIDIRDEYTNKTLNDCSIILRIIENDELETKKSIYEIFKNINMSL
YKIIEKIIENETEKVFENRYYEEHLREKLLKDDKIDVILTNFMEIREKIK
SNLEILGFVKFYLNVGGDKKKSKNKKMLVEKILNINVDLTVEDIADFVIK
ELEFWNITKRIEKVKKVNNEFLEKRRNRTYIKSYVLLDKHEKFKIERENK
KDKIVKFFVENIKNNSIKEKIEKILAEFKIDELIKKLEKELKKGNCDTEI
FGIFKKHYKVNFDSKKFSKKSDEEKELYKIIYRYLKGRIEKILVNEQKVR
LKKMEKIEIEKILNESILSEKILKRVKQYTLEHIMYLGKLRHNDIDMTTV
NTDDFSRLHAKEELDLELITFFASTNMELNKIFSRENINNDENIDFFGGD
REKNYVLDKKILNSKIKIIRDLDFIDNKNNITNNFIRKFTKIGTNERNRI
LHAISKERDLQGTQDDYNKVINIIQNLKISDEEVSKALNLDVVFKDKKNI
ITKINDIKISEENNNDIKYLPSFSKVLPEILNLYRNNPKNEPFDTIETEK
IVLNALIYVNKELYKKLILEDDLEENESKNIFLQELKKTLGNIDEIDENI
IENYYKNAQISASKGNNKAIKKYQKKVIECYIGYLRKNYEELFDFSDFKM
NIQEIKKQIKDINDNKTYERITVKTSDKTIVINDDFEYIISIFALLNSNA
VINKIRNRFFATSVWLNTSEYQNIIDILDEIMQLNTLRNECITENWNLNL
EEFIQKMKEIEKDFDDFKIQTKKEIFNNYYEDIKNNILTEFKDDINGCDV
LEKKLEKIVIFDDETKFEIDKKSNILQDEQRKLSNINKKDLKKKVDQYIK
DKDQEIKSKILCRIIFNSDFLKKYKKEIDNLIEDMESENENKFQEIYYPK
ERKNELYIYKKNLFLNIGNPNFDKIYGLISNDIKMADAKFLFNIDGKNIR
KNKISEIDAILKNLNDKLNGYSKEYKEKYIKKLKENDDFFAKNIQNKNYK
SFEKDYNRVSEYKKIRDLVEFNYLNKIESYLIDINWKLAIQMARFERDMH
YIVNGLRELGIIKLSGYNTGISRAYPKRNGSDGFYTTTAYYKFFDEESYK
KFEKICYGFGIDLSENSEINKPENESIRNYISHFYIVRNPFADYSIAEQI
DRVSNLLSYSTRYNNSTYASVFEVFKKDVNLDYDELKKKFKLIGNNDILE
RLMKPKKVSVLELESYNSDYIKNLIIELLTKIENTNDTL
  (SEQ ID NO: 221)
```

| Description | Sequence | SEQ ID NO: |
|---|---|---|
| SaCas9 | MGKRNYILGLDIGITSVGYGIIDYETRDVIDAGVRLFKEANVENNEGRRSKRGARRLKRRR | SEQ ID NO: 37 |
| Staphylococcus | RHRIQRVKKLLFDYNLLTDHSELSGINPYEARVKGLSQKLSEEEFSAALLHLAKRRGVHNV | |
| aureus | NEVEEDTGNELSTKEQISRNSKALEEKYVAELQLERLKKDGEVRGSINRFKTSDYVKEAKQ | |
| 1053 AA | LLKVQKAYHQLDQSFIDTYIDLLETRRTYYEGPGEGSPFGWKDIKEWYEMLMGHCTYFPEE | |
| 123 kDa | LRSVKYAYNADLYNALNDLNNLVITRDENEKLEYYEKFQIIENVFKQKKKPTLKQIAKEIL | |
| | VNEEDIKGYRVTSTGKPEFTNLKVYHDIKDITARKEIIENAELLDQIAKILTIYQSSEDIQ | |
| | EELTNLNSELTQEEIEQISNLKGYTGTHNLSLKAINLILDELWHTNDNQIAIFNRLKLVPK | |
| | KVDLSQQKEIPTTLVDDFILSPVVKRSFIQSIKVINAIIKKYGLPNDIIIELAREKNSKDA | |
| | QKMINEMQKRNRQTNERIEEIIRTTGKENAKYLIEKIKLHDMQEGKCLYSLEAIPLEDLLN | |
| | NPFNYEVDHIIPRSVSFDNSFNNKVLVKQEENSKKGNRTPFQYLSSSDSKISYETFKKHIL | |
| | NLAKGKGRISKTKKEYLLEERDINRFSVQKDFINRNLVDTRYATRGLMNLLRSYFRVNNLD | |
| | VKVKSINGGFTSFLRRKWKFKKERNKGYKHHAEDALIIANADFIFKEWKKLDKAKKVMENQ | |
| | MFEEKQAESMPEIETEQEYKEIFITPHQIKHIKDFKDYKYSHRVDKKPNRKLINDTLYSTR | |
| | KDDKGNTLIVNNLNGLYDKDNDKLKKLINKSPEKLLMYHHDPQTYQKLKLIMEQYGDEKNP | |
| | LYKYYEETGNYLTKYSKKDNGPVIKKIKYYGNKLNAHLDITDDYPNSRNKVVKLSLKPYRF | |
| | DVYLDNGVYKFVTVKNLDVIKKENYYEVNSKCYEEAKKLKKISNQAEFIASFYKNDLIKIN | |
| | GELYRVIGVNNDLLNRIEVNMIDITYREYLENMNDKRPPHIIKTIASKTQSIKKYSTDILG | |
| | NLYEVKSKKHPQIIKK | |
| NmeCas 9 | MAAFKPNSINYILGLDIGIASVGWAMVEIDEEENPIRLIDLGVRVFERAEVPKTGDSLAMA | SEQ ID NO: 38 |
| N. | RRLARSVRRLTRRRAHRLLRTRRLLKREGVLQAANFDENGLIKSLPNTPWQLRAAALDRKL | |
| meningitidis | TPLEWSAVLLHLIKHRGYLSQRKNEGETADKELGALLKGVAGNAHALQTGDFRTPAELALN | |
| 1083 AA | KFEKESGHIRNQRSDYSHTFSRKDLQAELILLFEKQKEFGNPHVSGGLKEGIETLLMTQRP | |
| 124.5 kDa | ALSGDAVQKMLGHCTFEPAEPKAAKNTYTAERFIWLTKLNNLRILEQGSERPLTDTERATL | |
| | MDEPYRKSKLTYAQARKLLGLEDTAFFKGLRYGKDNAEASTLMEMKAYHAISRALEKEGLK | |
| | DKKSPLNLSPELQDEIGTAFSLFKTDEDITGRLKDRIQPEILEALLKHISFDKFVQISLKA | |
| | LRRIVPLMEQGKRYDEACAEIYGDHYGKKNTEEKIYLPPIPADEIRNPVVLRALSQARKVI | |
| | NGVVRRYGSPARIHIETAREVGKSFKDRKEIEKRQEENRKDREKAAAKFREYFPNFVGEPK | |
| | SKDILKLRLYEQQHGKCLYSGKEINLGRLNEKGYVEIDAALPFSRTWDDSFNNKVLVLGSE | |
| | NQNKGNQTPYEYFNGKDNSREWQEFKARVETSRFPRSKKQRILLQKFDEDGFKERNLNDTR | |
| | YVNRFLCQFVADRMRLTGKGKKRVFASNGQITNLLRGFWGLRKVRAENDRHHALDAVVVAC | |
| | STVAMQQKITRFVRYKEMNAFDGKTIDKETGEVLHQKTHFPQPWEFFAQEVMIRVFGKPDG | |
| | KPEFEEADTLEKLRTLLAEKLSSRPEAVHEYVTPLFVSRAPNRKMSGQGHMETVKSAKRLD | |
| | EGVSVLRVPLTQLKLKDLEKMVNREREPKLYEALKARLEAHKDDPAKAFAEPFYKYDKAGN | |
| | RTQQVKAVRVEQVQKTGVWVRNHNGIADNATMVRVDVFEKGDKYYLVPIYSWQVAKGILPD | |
| | RAVVQGKDEEDWQLIDDSFNFKFSLHPNDLVEVITKKARMFGYFASCHRGTGNINIRIHDL | |
| | DHKIGKNGILEGIGVKTALSFQKYQIDELGKEIRPCRLKKRPPVR | |
| CjCas9 | MARILAFDIGISSIGWAFSENDELKDCGVRIFTKVENPKTGESLALPRRLARSARKRLARR | SEQ ID NO: 39 |
| C. jejuni | KARLNHLKHLIANEFKLNYEDYQSFDESLAKAYKGSLISPYELRFRALNELLSKQDFARVI | |
| 984 AA | LHIAKRRGYDDIKNSDDKEKGAILKAIKQNEEKLANYQSVGEYLYKEYFQKFKENSKEFTN | |
| 114.9 kDa | VRNKKESYERCIAQSFLKDELKLIFKKQREFGFSFSKKFEEEVLSVAFYKRALKDFSHLVG | |
| | NCSFFTDEKRAPKNSPLAFMFVALTRIINLLNNLKNTEGILYTKDDLNALLNEVLKNGTLT | |
| | YKQTKKLLGLSDDYEFKGEKGTYFIEFKKYKEFIKALGEHNLSQDDLNEIAKDITLIKDEI | |
| | KLKKALAKYDLNQNQIDSLSKLEFKDHLNISFKALKLVTPLMLEGKKYDEACNELNLKVAI | |
| | NEDKKDFLPAFNETYYKDEVTNPVVLRAIKEYRKVLNALLKKYGKVHKINIELAREVGKNH | |
| | SQRAKIEKEQNENYKAKKDAELECEKLGLKINSKNILKLRLFKEQKEFCAYSGEKIKISDL | |
| | QDEKMLEIDHIYPYSRSFDDSYMNKVLVFTKQNQEKLNQTPFEAFGNDSAKWQKIEVLAKN | |
| | LPTKKQKRILDKNYKDKEQKNFKDRNLNDTRYIARLVLNYTKDYLDFLPLSDDENTKLNDT | |
| | QKGSKVHVEAKSGMLTSALRHTWGFSAKDRNNHLHHAIDAVIIAYANNSIVKAFSDFKKEQ | |
| | ESNSAELYAKKISELDYKNKRKFFEPFSGFRQKVLDKIDEIFVSKPERKKPSGALHEETFR | |
| | KEEEFYQSYGGKEGVLKALELGKIRKVNGKIVKNGDMFRVDIFKHKKTNKFYAVPIYTMDF | |
| | ALKVLPNKAVARSKKGEIKDWILMDENYEFCFSLYKDSLILIQTKDMQEPEFVYYNAFTSS | |
| | TVSLIVSKHDNKFETLSKNQKILFKNANEKEVIAKSIGIQNLKVFEKYIVSALGEVTKAEF | |
| | RQREDFKK | |
| GeoCasS | MRYKIGLDIGITSVGWAVMNLDIPRIEDLGVRIFDRAENPQTGESLALPRRLARSARRRLR | SEQ ID NO: 40 |
| G. | RRKHRLERIRRLVIREGILTKEELDKLFEEKHEIDVWQLRVEALDRKLNNDELARVLLHLA | |
| stearothermo | KRRGFKSNRKSERSNKENSTMLKHIEENRAILSSYRTVGEMIVKDPKFALHKRNKGENYTN | |
| philus | TIARDDLEREIRLIFSKQREFGNMSCTEEFENEYITIWASQRPVASKDDIEKKVGFCTFEP | |
| | KEKRAPKATYTFQSFIAWEHINKLRLISPSGARGLTDEERRLLYEQAFQKNKITYHDIRTL | |
| 1087 AA | LHLPDDTYFKGIVYDRGESRKQNENIRFLELDAYHQIRKAVDKVYGKGKSSSFLPIDFDTF | |
| 127 kDa | GYALTLFKDDADIHSYLRNEYEQNGKRMPNLANKVYDNELIEELLNLSFTKFGHLSLKALR | |
| | SILPYMEQGEVYSSACERAGYTFTGPKKKQKTMLLPNIPPIANPVVMRALTQARKVVNAI1 | |
| | KKYGSPVSIHIELARDLSQTFDERRKTKKEQDENRKKNETAIRQLMEYGLTLNPTGHDIVK | |
| | FKLWSEQNGRCAYSLQPIEIERLLEPGYVEVDHVIPYSRSLDDSYTNKVLVLTRENREKGN | |
| | RIPAEYLGVGTERWQQFETFVLTNKQFSKKKRDRLLRLHYDENEETEFKNRNLNDTRYISR | |
| | FFANFIREHLKFAESDDKQKVYTVNGRVTAHLRSRWEFNKNREESDLHHAVDAVIVACTTP | |
| | SDIAKVTAFYQRREQNKELAKKTEPHFPQPWPHFADELRARLSKHPKESIKALNLGNYDDQ | |
| | KLESLQPVFVSRMPKRSVTGAAHQETLRRYVGIDERSGKIQTVVKTKLSEIKLDASGHFPM | |
| | YGKESDPRTYEAIRQRLLEHNNDPKKAFQEPLYKPKKNGEPGPVIRTVKIIDTKNQVIPLN | |
| | DGKTVAYNSNIVRVDVFEKDGKYYCVPVYTMDIMKGILPNKAIEPNKPYSEWKEMTEDYTF | |
| | RFSLYPNDLIRIELPREKTVKTAAGEEINVKDVFVYYKTIDSANGGLELISHDHRFSLRGV | |
| | GSRTLKRFEKYQVDVLGNIYKVRGEKRVGLASSAHSKPGKTIRPLQSTRD | |
| LbCas12a | MSKLEKFTNCYSLSKTLRFKAIPVGKTQENIDNKRLLVEDEKRAEDYKGVKKLLDRYYLSF | SEQ ID NO: 41 |
| L. bacterium | INDVLHSIKLKNLNNYISLFRKKTRTEKENKELENLEINLRKEIAKAFKGNEGYKSLFKKD | |
| 1228 AA | IIETILPEFLDDKDEIALVNSFNGFTTAFTGFFDNRENMFSEEAKSTSIAFRCINENLTRY | |
| 143.9 kDa | ISNMDIFEKVDAIFDKHEVQEIKEKILNSDYDVEDFFEGEFFNFVLTQEGIDVYNAIIGGF | |
| | VTESGEKIKGLNEYINLYNQKTKQKLPKFKPLYKQVLSDRESLSFYGEGYTSDEEVLEVFR | |
| | NTLNKNSEIFSSIKKLEKLFKNFDEYSSAGIFVKNGPAISTISKDIFGEWNVIRDKWNAEY | |
| | DDIHLKKKAVVTEKYEDDRRKSFKKIGSFSLEQLQEYADADLSVVEKLKEIIIQKVDEIYK | |
| | VYGSSEKLFDADFVLEKSLKKNDAVVAIMKDLLDSVKSFENYIKAFFGEGKETNRDESFYG | |
| | DFVLAYDILLKVDHIYDAIRNYVTQKPYSKDKFKLYFQNPQFMGGWDKDKETDYRATILRY | |
| | GSKYYLAIMDKKYAKCLQKIDKDDVNGNYEKINYKLLPGPNKMLPKVFFSKKWMAYYNPSE | |
| | DIQKIYKNGTFKKGDMFNLNDCHKLIDFFKDSISRYPKWSNAYDFNFSETEKYKDIAGFYR | |
| | EVEEQGYKVSFESASKKEVDKLVEEGKLYMFQIYNKDFSDKSHGTPNLHTMYFKLLFDENN | |
| | HGQIRLSGGAELFMRRASLKKEELVVHPANSPIANKNPDNPKKTTTLSYDVYKDKRFSEDQ | |
| | YELHIPIAINKCPKNIFKINTEVRVLLKHDDNPYVIGIDRGERNLLYIVVVDGKGNIVEQY | |
| | SLNEIINNFNGIRIKTDYHSLLDKKEKERFEARQNWTSIENIKELKAGYISQVVHKICELV | |
| | EKYDAVIALEDLNSGFKNSRVKVEKQVYQKFEKMLIDKLNYMVDKKSNPCATGGALKGYQI | |
| | TNKFESFKSMSTQNGFIFYIPAWLTSKIDPSTGFVNLLKTKYTSIADSKKFISSFDRIMYV | |
| | PEEDLFEFALDYKNFSRTDADYIKKWKLYSYGNRIRIFRNPKKNNVFDWEEVCLTSAYKEL | |
| | FNKYGINYQQGDIRALLCEQSDKAFYSSFMALMSLMLQMRNSITGRTDVDFLISPVKNSDG | |
| | IFYDSRNYEAQENAILPKNADANGAYNIARKVLWAIGQFKKAEDEKLDKVKIAISNKEWLE | |
| | YAQTSVKH | |
| BhCas12b | MATRSFILKIEPNEEVKKGLWKTHEVLNHGIAYYMNILKLIRQEAIYEHHEQDPKNPKKVS | SEQ ID NO: 42 |
| B. hisashii | KAEIQAELWDFVLKMQKCNSFTHEVDKDEVFNILRELYEELVPSSVEKKGEANQLSNKFLY | |
| 1108 AA | PLVDPNSQSGKGTASSGRKPRWYNLKIAGDPSWEEEKKKWEEDKKKDPLAKILGKLAEYGL | |
| 130.4kDa | IPLFIPYTDSNEPIVKEIKWMEKSRNQSVRRLDKDMFIQALERFLSWESWNLKVKEEYEKV | |
| | EKEYKTLEERIKEDIQALKALEQYEKERQEQLLRDTLNTNEYRLSKRGLRGWREIIQKWLK | |
| | MDENEPSEKYLEVFKDYQRKHPREAGDYSVYEFLSKKENHFIWRNHPEYPYLYATFCEIDK | |
| | KKKDAKQQATFTLADPINHPLWVRFEERSGSNLNKYRILTEQLHTEKLKKKLTVQLDRLIY | |
| | PTESGGWEEKGKVDIVLLPSRQFYNQIFLDIEEKGKHAFTYKDESIKFPLKGTLGGARVQF | |
| | DRDHLRRYPHKVESGNVGRIYFNMTVNIEPTESPVSKSLKIHRDDFPKVVNFKPKELTEWI | |
| | KDSKGKKLKSGIESLEIGLRVMSIDLGQRQAAAASIFEVVDQKPDIEGKLFFPIKGTELYA | |
| | VHRASFNIKLPGETLVKSREVLRKAREDNLKLMNQKLNFLRNVLHFQQFEDITEREKRVTK | |
| | WISRQENSDVPLVYQDELIQIRELMYKPYKDWVAFLKQLHKRLEVEIGKEVKHWRKSLSDG | |
| | RKGLYGISLKNIDEIDRTRKFLLRWSLRPTEPGEVRRLEPGQRFAIDQLNHLNALKEDRLK | |
| | KMANTIIMHALGYCYDVRKKKWQAKNPACQIILFEDLSNYNPYEERSRFENSKLMKWSRRE | |
| | IPRQVALQGEIYGLQVGEVGAQFSSRFHAKTGSPGIRCSVVTKEKLQDNRFFKNLQREGRL | |
| | TLDKIAVLKEGDLYPDKGGEKFISLSKDRKCVTTHADINAAQNLQKRFWTRTHGFYKVYCK | |
| | AYQVDGQTVYIPESKDQKQKIIEEFGEGYFILKDGVYEWVNAGKLKIKKGSSKQSSSELVD | |
| | SDILKDSFDLASELKGEKLMLYRDPSGNVFPSDKWMAAGVFFGKLERILISKLTNQYSIST | |
| | IEDDSSKQSM | |

[0221] Additional exemplary Cas9 equivalent protein sequences can include the following:

| Description | Sequence |
|---|---|
| AsCas12a | MTQFEGFTNLYQVSKTLRFELIPQGKTLKHIQEQGFIEEDKARNDHYKELKPIIDRIYKT |
| (previously | YADQCLQLVQLDWENLSAAIDSYRKEKTEETRNALIEEQATYRNAIHDYFIGRTDNLTDA |
| known as | INKRHAEIYKGLFKAELFNGKVLKQLGTVTTTEHENALLRSFDKFTTYFSGFYENRKNVF |
| Cpf1) | SAEDISTAIPHRIVQDNFPKFKENCHIFTRLITAVPSLREHFENVKKAIGIFVSTSIEEV |
| Acidaminococcus | FSFPFYNQLLTQTQIDLYNQLLGGISREAGTEKIKGLNEVLNLAIQKNDETAHIIASLPH |
| sp. | RFIPLFKQILSDRNTLSFILEEFKSDEEVIQSFCKYKTLLRNENVLETAEALFNELNSID |
| (strain | LTHIFISHKKLETISSALCDHWDTLRNALYERRISELTGKITKSAKEKVQRSLKHEDINL |
| BV3L6) | QEIISAAGKELSEAFKQKTSEILSHAHAALDQPLPTTLKKQEEKEILKSQLDSLLGLYHL |
| UniProtKB | LDWFAVDESNEVDPEFSARLTGIKLEMEPSLSFYNKARNYATKKPYSVEKFKLNFQMPTL |
| U2UMQ6 | ASGWDVNKEKNNGAILFVKNGLYYLGIMPKQKGRYKALSFEPTEKTSEGFDKMYYDYFPD |
| | AAKMIPKCSTQLKAVTAHFQTHTTPILLSNNFIEPLEITKEIYDLNNPEKEPKKFQTAYA |
| | KKTGDQKGYREALCKWIDFTRDFLSKYTKTTSIDLSSLRPSSQYKDLGEYYAELNPLLYH |
| | ISFQRIAEKEIMDAVETGKLYLFQIYNKDFAKGHHGKPNLHTLYWTGLFSPENLAKTSIK |
| | LNGQAELFYRPKSRMKRMAHRLGEKMLNKKLKDQKTPIPDTLYQELYDYVNHRLSHDLSD |
| | EARALLPNVITKEVSHEIIKDRRFTSDKFFFHVPITLNYQAANSPSKFNQRVNAYLKEHP |
| | ETPIIGIDRGERNLIYITVIDSTGKILEQRSLNTIQQFDYQKKLDNREKERVAARQAWSV |
| | VGTIKDLKQGYLSQVIHEIVDLMIHYQAVWLENLNFGFKSKRTGIAEKAVYQQFEKMLI |
| | DKLNCLVLKDYPAEKVGGVLNPYQLTDQFTSFAKMGTQSGFLFYVPAPYTSKIDPLTGFV |
| | DPFVWKTIKNHESRKHFLEGFDFLHYDVKTGDFILHFKMNRNLSFQRGLPGFMPAWDIVF |
| | EKNETQFDAKGTPFIAGKRIVPVIENHRFTGRYRDLYPANELIALLEEKGIVFRDGSNIL |
| | PKLLENDDSHAIDTMVALIRSVLQMRNSNAATGEDYINSPVRDLNGVCFDSRFQNPEWPM |
| | DADANGAYHIALKGQLLLNHLKESKDLKLQNGISNQDWLAYIQELRN (SEQ ID NO: 43) |
| AsCas12a | MTQFEGFTNLYQVSKTLRFELIPQGKTLKHIQEQGFIEEDKARNDHYKELKPIIDRIYKT |
| nickase | YADQCLQLVQLDWENLSAAIDSYRKEKTEETRNALIEEQATYRNAIHDYFIGRTDNLTDA |
| (e.g., | INKRHAEIYKGLFKAELFNGKVLKQLGTVTTTEHENALLRSFDKFTTYFSGFYENRKNVF |
| R1226A) | SAEDISTAIPHRIVQDNFPKFKENCHIFTRLITAVPSLREHFENVKKAIGIFVSTSIEEV |
| | FSFPFYNQLLTQTQIDLYNQLLGGISREAGTEKIKGLNEVLNLAIQKNDETAHIIASLPH |
| | RFIPLFKQILSDRNTLSFILEEFKSDEEVIQSFCKYKTLLRNENVLETAEALFNELNSID |
| | LTHIFISHKKLETISSALCDHWDTLRNALYERRISELTGKITKSAKEKVQRSLKHEDINL |
| | QEIISAAGKELSEAFKQKTSEILSHAHAALDQPLPTTLKKQEEKEILKSQLDSLLGLYHL |
| | LDWFAVDESNEVDPEFSARLTGIKLEMEPSLSFYNKARNYATKKPYSVEKFKLNFQMPTL |
| | ASGWDVNKEKNNGAILFVKNGLYYLGIMPKQKGRYKALSFEPTEKTSEGFDKMYYDYFPD |
| | AAKMIPKCSTQLKAVTAHFQTHTTPILLSNNFIEPLEITKEIYDLNNPEKEPKKFQTAYA |
| | KKTGDQKGYREALCKWIDFTRDFLSKYTKTTSIDLSSLRPSSQYKDLGEYYAELNPLLYH |
| | ISFQRIAEKEIMDAVETGKLYLFQIYNKDFAKGHHGKPNLHTLYWTGLFSPENLAKTSIK |
| | LNGQAELFYRPKSRMKRMAHRLGEKMLNKKLKDQKTPIPDTLYQELYDYVNHRLSHDLSD |
| | EARALLPNVITKEVSHEIIKDRRFTSDKFFFHVPITLNYQAANSPSKFNQRVNAYLKEHP |
| | ETPIIGIDRGERNLIYITVIDSTGKILEQRSLNTIQQFDYQKKLDNREKERVAARQAWSV |
| | VGTIKDLKQGYLSQVIHEIVDLMIHYQAVWLENLNFGFKSKRTGIAEKAVYQQFEKMLI |
| | DKLNCLVLKDYPAEKVGGVLNPYQLTDQFTSFAKMGTQSGFLFYVPAPYTSKIDPLTGFV |
| | DPFVWKTIKNHESRKHFLEGFDFLHYDVKTGDFILHFKMNRNLSFQRGLPGFMPAWDIVF |
| | EKNETQFDAKGTPFIAGKRIVPVIENHRFTGRYRDLYPANELIALLEEKGIVFRDGSNIL |
| | PKLLENDDSHAIDTMVALIRSVLQMANSNAATGEDYINSPVRDLNGVCFDSRFQNPEWPM |
| | DADANGAYHIALKGQLLLNHLKESKDLKLQNGISNQDWLAYIQELRN (SEQ ID NO: 44) |
| LbCas12a | 1 MNYKTGLEDF IGKESLSKTL RNALIPTEST KIHMEEMGVI RDDELRAEKQ QELKEIMDDY |
| (previously | 61 YRTFIEEKLG QIQGIQWNSL FQKMEETMED ISVRKDLDKI QNEKRKEICC YFTSDKRFKD |
| known as | 121 LFNAKLITDI LPNFIKDNKE YTEEEKAEKE QTRVLFQRFA TAFTNYFNQR RNNFSEDNIS |
| Cpf1) | 181 TAISFRIVNE NSEIHLQNMR AFQRIEQQYP EEVCGMEEEY KDMLQEWQMK HIYSVDFYDR |
| Lachnospiraceae | 241 ELTQPGIEYY NGICGKINEH MNQFCQKNRI NKNDFRMKKL HKQILCKKSS YYEIPFRFES |
| bacterium | 301 DQEVYDALNE FIKTMKKKEI IRRCVHLGQE CDDYDLGKIY ISSNKYEQIS NALYGSWDTI |
| GAM79 | 361 RKCIKEEYMD ALPGKGEKKE EKAEAAAKKE EYRSIADIDK IISLYGSEMD RTISAKKCIT |
| Ref Seq. | 421 EICDMAGQIS IDPLVCNSDI KLLQNKEKTT EIKTILDSFL HVYQWGQTFI VSDIIEKDSY |
| WP_119623382.1 | 481 FYSELEDVLE DFEGITTLYN HVRSYVTQKP YSTVKFKLHF GSPTLANGWS QSKEYDNNAI |
| | 541 LLMRDQKFYL GIFNVRNKPD KQIIKGHEKE EKGDYKKMIY NLLPGPSKML PKVFITSRSG |
| | 601 QETYKPSKHI LDGYNEKRHI KSSPKFDLGY CWDLIDYYKE CIHKHPDWKN YDFHFSDTKD |
| | 661 YEDISGFYRE VEMQGYQIKW TYISADEIQK LDEKGQIFLF QIYNKDFSVH STGKDNLHTM |
| | 721 YLKNLFSEEN LKDIVLKLNG EAELFFRKAS IKTPIVHKKG SVLVNRSYTQ TVGNKEIRVS |
| | 781 IPEEYYTEIY NYLNHIGKGK LSSEAQRYLD EGKIKSFTAT KDIVKNYRYC CDHYFLHLPI |
| | 841 TINFKAKSDV AVNERTLAYI AKKEDIHIIG IDRGERNLLY ISVVDVHGNI REQRSFNIVN |
| | 901 GYDYQQKLKD REKSRDAARK NWEEIEKIKE LKEGYLSMVI HYIAQLVVKY NAVVAMEDLN |
| | 961 YGFKTGRFKV ERQVYQKFET MLIEKLHYLV FKDREVCEEG GVLRGYQLTY IPESLKKVGK |
| | 1021 QCGFIFYVPA GYTSKIDPTT GFVNLFSFKN LTNRESRQDF VGKFDEIRYD RDKKMFEFSF |
| | 1081 DYNNYIKKGT ILASTKWKVY TNGTRLKRIV VNGKYTSQSM EVELTDAMEK MLQRAGIEYH |
| | 1141 DGKDLKGQIV EKGIEAEIID IFRLTVQMRN SRSESEDREY DRLISPVLND KGEFFDTATA |
| | 1201 DKTLPQDADA NGAYCIALKG LYEVKQIKEN WKENEQFPRN KLVQDNKTWF DFMQKKRYL |
| | (SEQ ID NO: 45) |
| PcCas12a - | 1 MAKNFEDFKR LYSLSKTLRF EAKPIGATLD NIVKSGLLDE DEHRAASYVK VKKLIDEYHK |
| previously | 61 VFIDRVLDDG CLPLENKGNN NSLAEYYESY VSRAQDEDAK KKFKEIQQNL RSVIAKKLTE |
| known at Cpf1 | 121 DKAYANLFGN KLIESYKDKE DKKKIIDSDL IQFINTAEST QLDSMSQDEA KELVKEFWGF |
| Prevotella. | 181 VTYFYGFFDN RKNMYTAEEK STGIAYRLVN ENLPKFIDNI EAFNRAITRP EIQENMGVLY |
| copri | 241 SDFSEYLNVE SIQEMFQLDY YNMLLTQKQI DVYNAIIGGK TDDEHDVKIK GINEYINLYN |
| Ref Seq. | 301 QQHKDDKLPK LKALFKQILS DRNAISWLPE EFNSDQEVLN AIKDCYERLA ENVLGDKVLK |
| WP_119227726. | 361 SLLGSLADYS LDGIFIRNDL QLTDISQKMF GNWGVIQNAI MQNIKRVAPA RKHKESEEDY |
| 1 | 421 EKRIAGIFKK ADSFSISYIN DCLNEADPNN AYFVENYFAT FGAVNTPTMQ RENLFALVQN |
| | 481 AYTEVAALLH SDYPTVKHLA QDKANVSKIK ALLDAIKSLQ HFVKPLLGKG DESDKDERFY |
| | 541 GELASLWAEL DTVTPLYNMI RNYMTRKPYS QKKIKLNFEN PQLLGGWDAN KEKDYATIIL |
| | 601 RRNGLYYLAI MDKDSRKLLG KAMPSDGECY EKMVYKFFKD VTTMIPKCST QLKDVQAYFK |
| | 661 VNTDDYVLNS KAFNKPLTIT KEVFDLNNVL YGKYKKFQKG YLTATGDNVG YTHAVNVWIK |
| | 721 FCMDFLNSYD STCIYDFSSL KPESYLSLDA FYQDANLLLY KLSFARASVS YINQLVEEGK |
| | 781 MYLFQIYNKD FSEYSKGTPN MHTLYWKALF DERNLADVVY KLNGQAEMFY RKKSIENTHP |
| | 841 THPANHPILN KNKDNKKKES LFDYDLIKDR RYTVDKFMFH VPITMNFKSV GSENINQDVK |
| | 901 AYLRHADDMH IIGIDRGERH LLYLVVIDLQ GNIKEQYSLN EIVNEYNGNT YHTNYHDLLD |
| | 961 VREEERLKAR QSWQTIENIK ELKEGYLSQV IHKITQLMVR YHAIVVLEDL SKGFMRSRQK |
| | 1021 VEKQVYQKFE KMLIDKLNYL VDKKTDVSTP GGLLNAYQLT CKSDSSQKLG KQSGFLFYIP |
| | 1081 AWNTSKIDPV TGFVNLLDTH SLNSKEKIKA FFSKFDAIRY NKDKKWFEFN LDYDKFGKKA |
| | 1141 EDTRTKWTLC TRGMRIDTFR NKEKNSQWDN QEVDLTTEMK SLLEHYYIDI HGNLKDAISA |
| | 1201 QTDKAFFTGL LHILKLTLQM RNSITGTETD YLVSPVADEN GIFYDSRSCG NQLPENADAN |
| | 1261 GAYNIARKGL MLIEQIKNAE DLNNVKFDIS NKAWLNFAQQ KPYKNG |
| | (SEQ ID NO: 46) |
| ErCas12a - | 1 MFSAKLISDI LPEFVIHNNN YSASEKEEKT QVIKLFSRFA TSFKDYFKNR ANCFSANDIS |
| previously | 61 SSSCHRIVND NAEIFFSNAL VYRRIVKNLS NDDINKISGD MKDSLKEMSL EEIYSYEKYG |
| known at Cpf1 | 121 EFITQEGISF YNDICGKVNL FMNLYCQKNK ENKNLYKLRK LHKQILCIAD TSYEVPYKFE |
| Eubacterium | 181 SDEEVYQSVN GFLDNISSKH IVERLRKIGE NYNGYNLDKI YIVSKFYESV SQKTYRDWET |
| rectale | 241 INTALEIHYN NILPGNGKSK ADKVKKAVKN DLQKSITEIN ELVSNYKLCP DDNIKAETYI |
| Ref Seq. | 301 HEISHILNNF EAQELKYNPE IHLVESELKA SELKNVLDVI MNAFHWCSVF MTEELVDKDN |
| WP_119223642. | 361 NFYAELEEIY DEIYPVISLY NLVRNYVTQK PYSTKKIKLN FGIPTLADGW SKSKEYSNNA |
| 1 | 421 IILMRDNLYY LGIFNAKNKP DKKIIEGNTS ENKGDYKKMI YNLLPGPNKM IPKVFLSSKT |
| | 481 GVETYKPSAY ILEGYKQNKH LKSSKDFDIT FCHDLIDYFK NCIAIHPEWK NFGFDFSDTS |
| | 541 TYEDISGFYR EVELQGYKID WTYISEKDID LLQEKGQLYL FQIYNKDFSK KSSGNDNLHT |
| | 601 MYLKNLFSEE NLKDIVLKLN GEAEIFFRKS SIKNPIIHKK GSILVNRTYE AEEKDQFGNI |
| | 661 QIVRKTIPEN IYQELYKYFN DKSDKELSDE AAKLKNVVGH HEAATNIVKD YRYTYDKYFL |
| | 721 HMPITINFKA NKTSFINDRI LQYIAKEKDL HVIGIDRGER NLIYVSVIDT CGNIVEQKSF |
| | 781 NIVNGYDYQI KLKQQEGARQ IARKEWKEIG KIKEIKEGYL SLVIHEISKM VIKYNAIIAM |
| | 841 EDLSYGFKKG RFKVERQVYQ KFETMLINKL NYLVFKDISI TENGGLLKGY QLTYIPDKLK |
| | 901 NVGHQCGCIF YVPAAYTSKI DPTTGFVNIF KFKDLTVDAK REFIKKFDSI RYDSDKNLFC |
| | 961 FTFDYNNFIT QNTVMSKSSW SVYTYGVRIK RRFVNGRFSN ESDTIDITKD MEKTLEMTDI |
| | 1021 NWRDGHDLRQ DIIDYEIVQH IFEIFKLTVQ MRNSLSELED RDYDRLISPV LNENNIFYDS |
| | 1081 AKAGDALPKD ADANGAYCIA LKGLYEIKQI TENWKEDGKF SRDKLKISNK DWFDFIQNKR |
| | 1141 YL (SEQ ID NO: 47) |
| CsCas12a - | 1 MNYKTGLEDF IGKESLSKTL RNALIPTEST KIHMEEMGVI RDDELRAEKQ QELKEIMDDY |
| previously | 61 YRAFIEEKLG QIQGIQWNSL FQKMEETMED ISVRKDLDKI QNEKRKEICC YFTSDKRFKD |
| known at Cpf1 | 121 LFNAKLITDI LPNFIKDNKE YTEEEKAEKE QTRVLFQRFA TAFTNYFNQR RNNFSEDNIS |
| Clostridium | 181 TAISFRIVNE NSEIHLQNMR AFQRIEQQYP EEVCGMEEEY KDMLQEWQMK HIYLVDFYDR |
| sp. AF34-10BH | 241 VLTQPGIEYY NGICGKINEH MNQFCQKNRI NKNDFRMKKL HKQILCKKSS YYEIPFRFES |
| Ref Seq. | 301 DQEVYDALNE FIKTMKEKEI ICRCVHLGQK CDDYDLGKIY ISSNKYEQIS NALYGSWDTI |
| WP_118538418. | 361 RKCIKEEYMD ALPGKGEKKE EKAEAAAKKE EYRSIADIDK IISLYGSEMD RTISAKKCIT |
| 1 | 421 EICDMAGQIS TDPLVCNSDI KLLQNKEKTT EIKTILDSFL HVYQWGQTFI VSDIIEKDSY |
| | 481 FYSELEDVLE DFEGITTLYN HVRSYVTQKP YSTVKFKLHF GSPTLANGWS QSKEYDNNAI |
| | 541 LLMRDQKFYL GIFNVRNKPD KQIIKGHEKE EKGDYKKMIY NLLPGPSKML PKVFITSRSG |
| | 601 QETYKPSKHI LDGYNEKRHI KSSPKFDLGY CWDLIDYYKE CIHKHPDWKN YDFHFSDTKD |
| | 661 YEDISGFYRE VEMQGYQIKW TYISADEIQK LDEKGQIFLF QIYNKDFSVH STGKDNLHTM |
| | 721 YLKNLFSEEN LKDIVLKLNG EAELFFRKAS IKTPIVHKKG SVLVNRSYTQ TVGNKEIRVS |
| | 781 IPEEYYTEIY NYLNHIGRGK LSTEAQRYLE ERKIKSFTAT KDIVKNYRYC CDHYFLHLPI |
| | 841 TINFKAKSDI AVNERTLAYI AKKEDIHIIG IDRGERNLLY ISVVDVHGNI REQRSFNIVN |
| | 901 GYDYQQKLKD REKSRDAARK NWEEIEKIKE LKEGYLSMVI HYIAQLVVKY NAVVAMEDLN |
| | 961 YGFKTGRFKV ERQVYQKFET MLIEKLHYLV FKDREVCEEG GVLRGYQLTY IPESLKKVGK |
| | 1021 QCGFIFYVPA GYTSKIDPTT GFVNLFSFKN LTNRESRQDF VGKFDEIRYD RDKKMFEFSF |
| | 1081 DYNNYIKKGT MLASTKWKVY TNGTRLKRIV VNGKYTSQSM EVELTDAMEK MLQRAGIEYH |
| | 1141 DGKDLKGQIV EKGIEAEIID IFRLTVQMRN SRSESEDREY DRLISPVLND KGEFFDTATA |
| | 1201 DKTLPQDADA NGAYCIALKG LYEVKQIKEN WKENEQFPRN KLVQDNKTWF DFMQKKRYL |
| | (SEQ ID NO: 48) |
| BhCas12b | 1 MATRSFILKI EPNEEVKKGL WKTHEVLNHG IAYYMNILKL IRQEAIYEHH EQDPKNPKKV |
| Bacillus | 61 SKAEIQAELW DFVLKMQKCN SFTHEVDKDE VFNILRELYE ELVPSSVEKK GEANQLSNKF |
| hisashii | 121 LYPLVDPNSQ SGKGTASSGR KPRWYNLKIA GDPSWEEEKK KWEEDKKKDP LAKILGKLAE |
| Ref Seq. | 181 YGLIPLFIPY TDSNEPIVKE IKWMEKSRNQ SVRRLDKDMF IQALERFLSW ESWNLKVKEE |
| WP_095142515. | 241 YEKVEKEYKT LEERIKEDIQ ALKALEQYEK ERQEQLLRDT LNTNEYRLSK RGLRGWREII |
| 1 | 301 QKWLKMDENE PSEKYLEVFK DYQRKHPREA GDYSVYEFLS KKENHFIWRN HPEYPYLYAT |
| | 361 FCEIDKKKKD AKQQATFTLA DPINHPLWVR FEERSGSNLN KYRILTEQLH TEKLKKKLTV |
| | 421 QLDRLIYPTE SGGWEEKGKV DIVLLPSRQF YNQIFLDIEE KGKHAFTYKD ESIKFPLKGT |
| | 481 LGGARVQFDR DHLRRYPHKV ESGNVGRIYF NMTVNIEPTE SPVSKSLKIH RDDFPKVVNF |
| | 541 KPKELTEWIK DSKGKKLKSG IESLEIGLRV MSIDLGQRQA AAASIFEVVD QKPDIEGKLF |
| | 601 FPIKGTELYA VHRASFNIKL PGETLVKSRE VLRKAREDNL KLMNQKLNFL RNVLHFQQFE |
| | 661 DITEREKRVT KWISRQENSD VPLVYQDELI QIRELMYKPY KDWVAFLKQL HKRLEVEIGK |
| | 721 EVKHWRKSLS DGRKGLYGIS LKNIDEIDRT RKFLLRWSLR PTEPGEVRRL EPGQRFAIDQ |
| | 781 LNHLNALKED RLKKMANTII MHALGYCYDV RKKKWQAKNP ACQIILFEDL SNYNPYEERS |
| | 841 RFENSKLMKW SRREIPRQVA LQGEIYGLQV GEVGAQFSSR FHAKTGSPGI RCSVVTKEKL |
| | 901 QDNRFFKNLQ REGRLTLDKI AVLKEGDLYP DKGGEKFISL SKDRKCVTTH ADINAAQNLQ |
| | 961 KRFWTRTHGF YKVYCKAYQV DGQTVYIPES KDQKQKIIEE FGEGYFILKD GVYEWVNAGK |
| | 1021 LKIKKGSSKQ SSSELVDSDI LKDSFDLASE LKGEKLMLYR DPSGNVFPSD KWMAAGVFFG |
| | 1081 KLERILISKL TNQYSISTIE DDSSKQSM (SEQ ID NO: 49) |
| ThCas12b | 1 MSEKTTQRAY TLRLNRASGE CAVCQNNSCD CWHDALWATH KAVNRGAKAF GDWLLTLRGG |
| Thermomonas | 61 LCHTLVEMEV PAKGNNPPQR PTDQERRDRR VLLALSWLSV EDEHGAPKEF IVATGRDSAD |
| hydrothermalis | 121 DRAKKVEEKL REILEKRDFQ EHEIDAWLQD CGPSLKAHIR EDAVWVNRRA LFDAAVERIK |
| Ref Seq. | 181 TLTWEEAWDF LEPFFGTQYF AGIGDGKDKD DAEGPARQGE KAKDLVQKAG QWLSARFGIG |
| WP_072754838 | 241 TGADFMSMAE AYEKIAKWAS QAQNGDNGKA TIEKLACALR PSEPPTLDTV LKCISGPGHK |
| | 301 SATREYLKTL DKKSTVTQED LNQLRKLADE DARNCRKKVG KKGKKPWADE VLKDVENSCE |
| | 361 LTYLQDNSPA RHREFSVMLD HAARRVSMAH SWIKKAEQRR RQFESDAQKL KNLQERAPSA |
| | 421 VEWLDRFCES RSMTTGANTG SGYRIRKRAI EGWSYVVQAW AEASCDTEDK RIAAARKVQA |
| | 481 DPEIEKFGDI QLFEALAADE AICVWRDQEG TQNPSILIDY VTGKTAEHNQ KRFKVPAYRH |
| | 541 PDELRHPVFC DFGNSRWSIQ FAIHKEIRDR DKGAKQDTRQ LQNRHGLKMR LWNGRSMTDV |
| | 601 NLHWSSKRLT ADLALDQNPN PNPTEVTRAD RLGRAASSAF DHVKIKNVFN EKEWNGRLQA |
| | 661 PRAELDRIAK LEEQGKTEQA EKLRKRLRWY VSFSPCLSPS GPFIVYAGQH NIQPKRSGQY |
| | 721 APHAQANKGR ARLAQLILSR LPDLRILSVD LGHRFAAACA VWETLSSDAF RREIQGLNVL |
| | 781 AGGSGEGDLF LHVEMTGDDG KRRTVVYRRI GPDQLLDNTP HPAPWARLDR QFLIKLQGED |
| | 841 EGVREASNEE LWTVHKLEVE VGRTVPLIDR MVRSGFGKTE KQKERLKKLR ELGWISAMPN |
| | 901 EPSAETDEKE GEIRSISRSV DELMSSALGT LRLALKRHGN RARIAFAMTA DYKPMPGGQK |
| | 961 YYFHEAKEAS KNDDETKRRD NQIEFLQDAL SLWHDLFSSP DWEDNEAKKL WQNHIATLPN |
| | 1021 YQTPEEISAE LKRVERNKKR KENRDKLRTA AKALAENDQL RQHLHDTWKE RWESDDQQWK |
| | 1081 ERLRSLKDWI FPRGKAEDNP SIRHVGGLSI TRINTISGLY QILKAFKMRP EPDDLRKNIP |
| | 1141 QKGDDELENF NRRLLEARDR LREQRVKQLA SRIIEAALGV GRIKIPKNGK LPKRPRTTVD |
| | 1201 TPCHAVVIES LKTYRPDDLR TRRENRQLMQ WSSAKVRKYL KEGCELYGLH FLEVPANYTS |
| | 1261 RQCSRTGLPG IRCDDVPTGD FLKAPWWRRA INTAREKNGG DAKDRFLVDL YDHLNNLQSK |
| | 1321 GEALPATVRV PRQGGNLFIA GAQLDDTNKE RRAIQADLNA AANIGLRALL DPDWRGRWWY |
| | 1381 VPCKDGTSEP ALDRIEGSTA FNDVRSLPTG DNSSRRAPRE IENLWRDPSC |
| | 1441 |
| LsCas12b | 1 MSIRSFKLKL KTKSGVNAEQ LRRGLWRTHQ LINDGIAYYM NWLVLLRQED LFIRNKETNE |
| Laceyella | 61 IEKRSKEEIQ AVLLERVHKQ QQRNQWSGEV DEQTLLQALR QLYEEIVPSV IGKSGNASLK |
| sacchari | 121 ARFFLGPLVD PNNKTTKDVS KSGPTPKWKK MKDAGDPNWV QEYEKYMAER QTLVRLEEMG |
| WP_132221894. | 181 LIPLFPMYTD EVGDIHWLPQ ASGYTRTWDR DMFQQAIERL LSWESWNRRV RERRAQFEKK |
| 1 | 241 THDFASRFSE SDVQWMNKLR EYEAQQEKSL EENAFAPNEP YALTKKALRG WERVYHSWMR |
| | 301 LDSAASEEAY WQEVATCQTA MRGEFGDPAI YQFLAQKENH DIWRGYPERV IDFAELNHLQ |
| | 361 RELRRAKEDA TFTLPDSVDH PLWVRYEAPG GTNIHGYDLV QDTKRNLTLI LDKFILPDEN |
| | 421 GSWHEVKKVP FSLAKSKQFH RQVWLQEEQK QKKREVVFYD YSTNLPHLGT LAGAKLQWDR |
| | 481 NFLNKRTQQQ IEETGEIGKV FFNISVDVRP AVEVKNGRLQ NGLGKALTVL THPDGTKIVT |
| | 541 GWKAEQLEKW VGESGRVSSL GLDSLSEGLR VMSIDLGQRT SATVSVFEIT KEAPDNPYKF |
| | 601 FYQLEGTEMF AVHQRSFLLA LPGENPPQKI KQMREIRWKE RNRIKQQVDQ LSAILRLHKK |
| | 661 VNEDERIQAI DKLLQKVASW QLNEEIATAW NQALSQLYSK AKENDLQWNQ AIKNAHHQLE |
| | 721 PWGKQISLVV RKDLSTGRQG IAGLSLWSIE ELEATKKLLT RWSKRSREPG VVKRIERFET |
| | 781 FAKQIQHHIN QVKENRLKQL ANLIVMTALG YKYDQEQKKW IEVYPACQVV LFENLRSYRF |
| | 841 SFERSRRENK KLMEWSHRSI PKLVQMQGEL FGLQVADVYA AYSSRYHGRT GAPGIRCHAL |
| | 901 TEADLRNETN IIHELIEAGF IKEEHRPYLQ QGDLVPWSGG ELFATLQKPY DNPRILTLHA |
| | 961 DINAAQNIQK RFWHPSMWFR VNCESVMEGE IVTYVPKNKT VHKKQGKTFR FVKVEGSDVY |
| | 1021 EWAKWSKNRN KNTFSSITER KPPSSMILFR DPSGTFFKEQ EWVEQKTFWG KVQSMIQAYM |
| | 1081 KKTIVQRMEE (SEQ ID NO: 51) |
| DtCas12b | 1 MVLGRKDDTA ELRRALWTTH EHVNLAVAEV ERVLLRCRGR SYWTLDRRGD PVHVPESQVA |
| Dsulfonatronum | 61 EDALAMAREA QRRNGVVPWG EDEEILLALR YLYEQIVPSC LLDDLGKPLK GDAQKIGTNY |
| thiodismutans | 121 AGPLFDSDTC RRDEGKDVAC CGPFHEVAGK YLGALPEWAT PISKQEFDGK DASHLRFKAT |
| WP_031386437 | 181 GGDDAFFRVS IEKANAWYED PANQDALKNK AYNKDDWKKE KDKGISSWAV KYIQKQLQLG |
| | 241 QDPRTEVRRK LWLELGLLPL FIPVFDKTMV GNLWNRLAVR LALAHLLSWE SWNHRAVQDQ |
| | 301 ALARAKRDEL AALFLGMEDG FAGLREYELR RNESIKQHAF EPVDRPYWSG RALRSVVTRV |
| | 361 REEWLRHGDT QESRKNICNR LQDRLRGKFG DPDVFHWLAE DGQEALWKER DCVTSFSLLN |
| | 421 DADGLLEKRK GYALMTFADA RLHPRWAMYE APGGSNLRTY QIRKTENGLW ADVVLLSPRN |
| | 481 ESAAVEEKTF NVRLAPSGQL SNVSFDQIQK GSKMVGRCRY QSANQQFEGL LGGAEILFDR |
| | 541 KRIANEQHGA TDLASKPGHV WFKLTLDVRP QAPQGWLDGK GRPALPPEAK HFKTALSNKS |
| | 601 KFADQVRPGL RVLSVDLGVR SFAACSVFEL VRGGPDQGTY FPAADGRTVD DPEKLWAKHE |
| | 661 RSFKITLPGE NPSRKEEIAR RAAMEELRSL NGDIRRLKAI LRLSVLQEDD PRTEHLRLFM |
| | 721 EAIVDDPAKS ALNAELFKGF GDDRFRSTPD LWKQHCHFFH DKAEKVVAER FSRWRTETRP |
| | 781 KSSSWQDWRE RRGYAGGKSY WAVTYLEAVR GLILRWNMRG RTYGEVNRQD KKQFGTVASA |
| | 841 LLHHINQLKE DRIKTGADMI IQAARGFVPR KNGAGWVQVH EPCRLILFED LARYRFRTDR |
| | 901 SRRENSRLMR WSHREIVNEV GMQGELYGLH VDTTEAGFSS RYLASSGAPG VRCRHLVEED |
| | 961 FHDGLPGMHL VGELDWLLPK DKDRTANEAR RLLGGMVRPG MLVPWDGGEL FATLNAASQL |
| | 1021 HVIHADINAA QNLQRRFWGR CGEAIRIVCN QLSVDGSTRY EMAKAPKARL LGALQQLKNG |
| | 1081 DAPFHLTSIP NSQKPENSYV MTPTNAGKKY RAGPGEKSSG EEDELALDIV EQAEELAQGR |
| | 1141 KTFFRDPSGV FFAPDRWLPS EIYWSRIRRR IWQVTLERNS SGRQERAEMD EMPY |
| | (SEQ ID NO: 52) |

napDNAbps that Recognize Non-Canonical PAM Sequences

[0222] In some embodiments, the napDNAbp is a nucleic acid programmable DNA binding protein that does not require a canonical (NGG) PAM sequence. In some embodiments, the napDNAbp is an argonaute protein. One example of such a nucleic acid programmable DNA binding protein is an Argonaute protein from Natronobacterium gregoryi (NgAgo). NgAgo is a ssDNA-guided endonuclease. NgAgo binds 5′ phosphorylated ssDNA of ˜24 nucleotides (gDNA) to guide it to its target site and will make DNA double-strand breaks at the gDNA site. In contrast to Cas9, the NgAgo-gDNA system does not require a protospacer-adjacent motif (PAM). Using a nuclease inactive NgAgo (dNgAgo) can greatly expand the bases that may be targeted. The characterization and use of NgAgo have been described in Gao et al., Nat Biotechnol., 2016 July; 34(7):768-73. PubMed PMID: 27136078; Swarts et al., Nature. 507(7491) (2014):258-61; and Swarts et al., Nucleic Acids Res. 43(10) (2015):5120-9, each of which is incorporated herein by reference.

[0223] In some embodiments, the disclosure provides napDNAbp domains that comprise SpCas9 variants that recognize and work best with NRRH, NRCH, and NRTH PAMs. See International Application No. PCT/US2019/47996, which published as International Publication No. WO 2020/041751 on Feb. 27, 2020, incorporated by reference herein. In some embodiments, the disclosed base editors comprise a napDNAbp domain selected from SpCas9-NRRH, SpCas9-NRTH, and SpCas9-NRCH.

[0224] In some embodiments, the disclosed base editors comprise a napDNAbp domain that has a sequence that is at least 90%, at least 95%, at least 98%, or at least 99% identical to SpCas9-NRRH. In some embodiments, the disclosed base editors comprise a napDNAbp domain that comprises SpCas9-NRRH. The SpCas9-NRRH has an amino acid sequence as presented in SEQ ID NO: 53 (underlined residues are mutated relative to SpCas9, as set forth in SEQ ID NO: 213).

(SEQ ID NO: 53)
MDKKYSIGLDIGTNSVGWAVITDEYKVPSKKFKVL
GNTDRHSIKKNLIGALLFDSGETAEATRLKRTARR
RYTRRKNRICYLQEIFSNEMAKVDDSFFHRLEESF
LVEEDKKHERHPIFGNIVDEVAYHEKYPTIYHLRK
KLVDSTDKADLRLIYLALAHMIKFRGHFLIEGDLN
PDNSDVDKLFIQLVQTYNQLFEENPINASGVDAKA
ILSARLSKSRRLENLIAQLPGEKKNGLFGNLIALS
LGLTPNFKSNFDLAEDAKLQLSKDTYDDDLDNLLA
QIGDQYADLFLAAKNLSDAILLSDILRVNTEITKA
PLSASMVKRYDEHHQDLTLLKALVRQQLPEKYKEI
FFDQSKNGYAGYIDGGASQEEFYKFIKPILEKMDG
TEELLVKLNREDLLRKQRTFDNGIIPHQIHLGELH
AILRRQGDFYPFLKDNREKIEKILTFRIPYYVGPL
ARGNSRFAWMTRKSEETITPWNFEEVVDKGASAQS
FIERMTNFDKNLPNEKVLPKHSLLYEYFTVYNELT
KVKYVTEGMRKPAFLSGEQKKAIVDLLFKTNRKVT
VKQLKEDYFKKIECFDSVEISGVEDRFNASLGTYH
DLLKIIKDKDFLDNEENEDILEDIVLTLTLFEDRE
MIEERLKTYAHLFDDKVMKQLKRLRYTGWGRLSRK
LINGIRDKQSGKTILDFLKSDGFANRNFMQLIHDD
SLTFKEDIQKAQVSGQGDSLHEHIANLAGSPAIKK
GILQTVKVVDELVKVMGGHKPENIVIEMARENQTT
QKGQKNSRERMKRIEEGIKELGSQILKEHPVENTQ
LQNEKLYLYYLQNGRDMYVDQELDINRLSDYDVDH
IVPQSFLKDDSIDNKVLTRSDKNRGKSDNVPSEEV
VKKMKNYWRQLLNAKLITQRKFDNLTKAERGGLSE
LDKAGFIKRQLVETRQITKHVAQILDSRMNTKYDE
NDKLIREVKVITLKSKLVSDFRKDFQFYKVREINN
YHHAHDAYLNAVVGTALIKKYPKLESEFVYGDYKV
YDVRKMIAKSEQEIGKATAKYFFYSNIMNFFKTEI
TLANGEIRKRPLIETNGETGEIVWDKGRDFATVRK
VLSMPQVNIVKKTEVQTGGFSKESILPKGNSDKLI
ARKKDWDPKKYGGFNSPTAAYSVLVVAKVEKGKSK
KLKSVKELLGITIMERSSFEKNPIGFLEAKGYKEV
KKDLIIKLPKYSLFELENGRKRMLASAGVLHKGNE
LALPSKYVNFLYLASHYEKLKGSPEDNEQKQLFVE
QHKHYLDEIIEQISEFSKRVILADANLDKVLSAYN
KHRDKPIREQAENIIHLFTLTNLGVPAAFKYFDTT
IDKKRYTSTKEVLDATLIHQSITGLYETRIDLSQL
GGD.

[0225] In some embodiments, the disclosed base editors comprise a napDNAbp domain that has a sequence that is at least 90%, at least 95%, at least 98%, or at least 99% identical to SpCas9-NRCH. In some embodiments, the disclosed base editors comprise a napDNAbp domain that comprises SpCas9-NRCH. The SpCas9-NRCH has an amino acid sequence as presented in SEQ ID NO: 54 (underlined residues are mutated relative to SpCas9)

(SEQ ID NO: 54)
MDKKYSIGLDIGTNSVGWAVITDEYKVPSKKFKVL
GNTDRHSIKKNLIGALLFDSGETAEATRLKRTARR
RYTRRKNRICYLQEIFSNEMAKVDDSFFHRLEESF
LVEEDKKHERHPIFGNIVDEVAYHEKYPTIYHLRK
KLVDSTDKADLRLIYLALAHMIKFRGHFLIEGDLN
PDNSDVDKLFIQLVQTYNQLFEENPINASGVDAKA
ILSARLSKSRRLENLIAQLPGEKKNGLFGNLIALS
LGLTPNFKSNFDLAEDAKLQLSKDTYDDDLDNLLA
QIGDQYADLFLAAKNLSDAILLSDILRVNTEITKA
PLSASMVKRYDEHHQDLTLLKALVRQQLPEKYKEI
FFDQSKNGYAGYIDGGASQEEFYKFIKPILEKMDG
TEELLVKLNREDLLRKQRTFDNGIIPHQIHLGELH
AILRRQGDFYPFLKDNREKIEKILTFRIPYYVGPL
ARGNSRFAWMTRKSEETITPWNFEEVVDKGASAQS
FIERMTNFDKNLPNEKVLPKHSLLYEYFTVYNELT
KVKYVTEGMRKPAFLSGEQKKAIVDLLFKTNRKVT
VKQLKEDYFKKIECFDSVEISGVEDRFNASLGTYH
DLLKIIKDKDFLDNEENEDILEDIVLTLTLFEDRE
MIEERLKTYAHLFDDKVMKQLKRLRYTGWGRLSRK
LINGIRDKQSGKTILDFLKSDGFANRNFMQLIHDD
SLTFKEDIQKAQVSGQGDSLHEHIANLAGSPAIKK
GILQTVKVVDELVKVMGGHKPENIVIEMARENQTT
QKGQKNSRERMKRIEEGIKELGSQILKEHPVENTQ
LQNEKLYLYYLQNGRDMYVDQELDINRLSDYDVDH
IVPQSFLKDDSIDNKVLTRSDKNRGKSDNVPSEEV
VKKMKNYWRQLLNAKLITQRKFDNLTKAERGGLSE
LDKAGFIKRQLVETRQITKHVAQILDSRMNTKYDE
NDKLIREVKVITLKSKLVSDFRKDFQFYKVREINN
YHHAHDAYLNAVVGTALIKKYPKLESEFVYGDYKV
YDVRKMIAKSEQEIGKATAKYFFYSNIMNFFKTEI
TLANGEIRKRPLIETNGETGEIVWDKGRDFATVRK
VLSMPQVNIVKKTEVQTGGFSKESILPKGNSDKLI
ARKKDWDPKKYGGFNSPTVAYSVLVVAKVEKGKSK
KLKSVKELLGITIMERSSFEKNPIDFLEAKGYKEV
KKDLIIKLPKYSLFELENGRKRMLASAGVLQKGNE
LALPSKYVNFLYLASHYEKLKGSPEDNEQKQLFVE
QHKHYLDEIIEQISEFSKRVILADANLDKVLSAYN
KHRDKPIREQAENIIHLFTLTNLGAPAAFKYFDTT
INRKQYNTTKEVLDATLIRQSITGLYETRIDLSQL
GGD

[0226] In some embodiments, the disclosed base editors comprise a napDNAbp domain that has a sequence that is at least 90%, at least 95%, at least 98%, or at least 99% identical to SpCas9-NRTH. In some embodiments, the disclosed base editors comprise a napDNAbp domain that comprises SpCas9-NRTH. The SpCas9-NRTH has an amino acid sequence as presented in SEQ ID NO: 55 (underlined residues are mutated relative to SpCas9)

(SEQ ID NO: 55)
MDKKYSIGLDIGTNSVGWAVITDEYKVPSKKFKVL
GNTDRHSIKKNLIGALLFDSGETAEATRLKRTARR
RYTRRKNRICYLQEIFSNEMAKVDDSFFHRLEESF
LVEEDKKHERHPIFGNIVDEVAYHEKYPTIYHLRK
KLVDSTDKADLRLIYLALAHMIKFRGHFLIEGDLN
PDNSDVDKLFIQLVQTYNQLFEENPINASGVDAKA
ILSARLSKSRRLENLIAQLPGEKKNGLFGNLIALS
LGLTPNFKSNFDLAEDAKLQLSKDTYDDDLDNLLA
QIGDQYADLFLAAKNLSDAILLSDILRVNTEITKA
PLSASMVKRYDEHHQDLTLLKALVRQQLPEKYKEI
FFDQSKNGYAGYIDGGASQEEFYKFIKPILEKMDG
TEELLVKLNREDLLRKQRTFDNGIIPHQIHLGELH
AILRRQGDFYPFLKDNREKIEKILTFRIPYYVGPL
ARGNSRFAWMTRKSEETITPWNFEEVVDKGASAQS
FIERMTNFDKNLPNEKVLPKHSLLYEYFTVYNELT
KVKYVTEGMRKPAFLSGEQKKAIVDLLFKTNRKVT
VKQLKEDYFKKIECFDSVEISGVEDRFNASLGTYH
DLLKIIKDKDFLDNEENEDILEDIVLTLTLFEDRE
MIEERLKTYAHLFDDKVMKQLKRLRYTGWGRLSRK
LINGIRDKQSGKTILDFLKSDGFANRNFMQLIHDD
SLTFKEDIQKAQVSGQGDSLHEHIANLAGSPAIKK
GILQTVKVVDELVKVMGGHKPENIVIEMARENQTT
QKGQKNSRERMKRIEEGIKELGSQILKEHPVENTQ
LQNEKLYLYYLQNGRDMYVDQELDINRLSDYDVDH
IVPQSFLKDDSIDNKVLTRSDKNRGKSDNVPSEEV
VKKMKNYWRQLLNAKLITQRKFDNLTKAERGGLSE
LDKAGFIKRQLVETRQITKHVAQILDSRMNTKYDE
NDKLIREVKVITLKSKLVSDFRKDFQFYKVREINN
YHHAHDAYLNAVVGTALIKKYPKLESEFVYGDYKV
YDVRKMIAKSEQEIGKATAKYFFYSNIMNFFKTEI
TLANGEIRKRPLIETNGETGEIVWDKGRDFATVRK
VLSMPQVNIVKKTEVQTGGFSKESILPKGNSDKLI
ARKKDWDPKKYGGFNSPTVAYSVLVVAKVEKGKSK
KLKSVKELLGITIMERSSFEKNPIGFLEAKGYKEV
KKDLIIKLPKYSLFELENGRKRMLASASVLHKGNE
LALPSKYVNFLYLASHYEKLKGSSEDNKQKQLFVE
QHKHYLDEIIEQISEFSKRVILADANLDKVLSAYN
KHRDKPIREQAENIIHLFTLTNLGASAAFKYFDTT
IGRKLYTSTKEVLDATLIHQSITGLYETRIDLSQL
GGD

[0227] In other embodiments, the napDNAbp of any of the disclosed base editors comprises a Cas9 derived from a Streptococcus macacae, e.g. Streptococcus macacae NCTC 11558, or SmacCas9, or a variant thereof. In some embodiments, the napDNAbp comprises a hybrid variant of SmacCas9 that incorporates an SpCas9 domain with the SmacCas9 domain and is known as Spy-macCas9, or a variant thereof. In some embodiments, the napDNAbp comprises a hybrid variant of SmacCas9 that incorporates an increased nucleolytic variant of an SpCas9 (iSpy Cas9) domain and is known as iSpy-macCas9. Relative to Spymac-Cas9, iSpyMac-Cas9 contains two mutations, R221K and N394K, that were identified by deep mutational scans of Spy Cas9 that raise modification rates of the protein on most targets. See Jakimo et al., bioRxiv, A Cas9 with Complete PAM Recognition for Adenine Dinucleotides (September 2018), herein incorporated by reference. Jakimo et al. showed that the hybrids Spy-macCas9 and iSpy-macCas9 recognize a short 5′-NAA-3′ PAM and recognized all evaluated adenine dinucleotide PAM sequences and posseseds robust editing efficiency in human cells. Liu et al. engineered base editors containing Spy-mac Cas9, and demonstrated that cytidine and base editors containing Spymac domains can induce efficient C-to-T and A-to-G conversions in vivo. In addition, Liu et al. suggested that the PAM scope of Spy-mac Cas9 may be 5′-TAAA-3′, rather than 5′-NAA-3′ as reported by Jakimo et al. See Liu et al. Cell Discovery (2019) 5:58, herein incorporated by reference.

[0228] In some embodiments, the disclosed base editors comprise a napDNAbp domain that has a sequence that is at least 90%, at least 95%, at least 98%, or at least 99% identical to iSpyMac-Cas9. In some embodiments, the disclosed base editors comprise a napDNAbp domain that comprises iSpyMac-Cas9. The iSpyMac-Cas9 has an amino acid sequence as presented in SEQ ID NO: 56 (R221K and N394K mutations are underlined):

(SEQ ID NO: 56)
DKKYSIGLDIGTNSVGWAVITDEYKVPSKKFKVLG
NTDRHSIKKNLIGALLFDSGETAEATRLKRTARRR
YTRRKNRICYLQEIFSNEMAKVDDSFFHRLEESFL
VEEDKKHERHPIFGNIVDEVAYHEKYPTIYHLRKK
LVDSTDKADLRLIYLALAHMIKFRGHFLIEGDLNP
DNSDVDKLFIQLVQTYNQLFEENPINASGVDAKAI
LSARLSKSRKLENLIAQLPGEKKNGLFGNLIALSL
GLTPNFKSNFDLAEDAKLQLSKDTYDDDLDNLLAQ
IGDQYADLFLAAKNLSDAILLSDILRVNTEITKAP
LSASMIKRYDEHHQDLTLLKALVRQQLPEKYKEIF
FDQSKNGYAGYIDGGASQEEFYKFIKPILEKMDGT
EELLVKLKREDLLRKQRTFDNGSIPHQIHLGELHA
ILRRQEDFYPFLKDNREKIEKILTFRIPYYVGPLA
RGNSRFAWMTRKSEETITPWNFEEVVDKGASAQSF
IERMTNFDKNLPNEKVLPKHSLLYEYFTVYNELTK
VKYVTEGMRKPAFLSGEQKKAIVDLLFKTNRKVTV
KQLKEDYFKKIECFDSVEISGVEDRFNASLGTYHD
LLKIIKDKDFLDNEENEDILEDIVLTLTLFEDREM
IEERLKTYAHLFDDKVMKQLKRRRYTGWGRLSRKL
INGIRDKQSGKTILDFLKSDGFANRNFMQLIHDDS
LTFKEDIQKAQVSGQGDSLHEHIANLAGSPAIKKG
ILQTVKVVDELVKVMGRHKPENIVIEMARENQTTQ
KGQKNSRERMKRIEEGIKELGSQILKEHPVENTQL
QNEKLYLYYLQNGRDMYVDQELDINRLSDYDVDHI
VPQSFLKDDSIDNKVLTRSDKNRGKSDNVPSEEVV
KKMKNYWRQLLNAKLITQRKFDNLTKAERGGLSEL
DKAGFIKRQLVETRQITKHVAQILDSRMNTKYDEN
DKLIREVKVITLKSKLVSDFRKDFQFYKVREINNY
HHAHDAYLNAVVGTALIKKYPKLESEFVYGDYKVY
DVRKMIAKSEQEIGKATAKYFFYSNIMNFFKTEIT
LANGEIRKRPLIETNGETGEIVWDKGRDFATVRKV
LSMPQVNIVKKTEIQTVGQNGGLFDDNPKSPLEVT
PSKLVPLKKELNPKKYGGYQKPTTAYPVLLITDTK
QLIPISVMNKKQFEQNPVKFLRDRGYQQVGKNDFI
KLPKYTLVDIGDGIKRLWASSKEIHKGNQLVVSKK
SQILLYHAHHLDSDLSNDYLQNHNQQFDVLFNEII
SFSKKCKLGKEHIQKIENVYSNKKNSASIEELAES
FIKLLGFTQLGATSPFNFLGVKLNQKQYKGKKDYI
LPCTEGTLIRQSITGLYETRVDLSKIGED

[0229] In other embodiments, the napDNAbp of any of the disclosed base editors is a prokaryotic homolog of an Argonaute protein. Prokaryotic homologs of Argonaute proteins are known and have been described, for example, in Makarova K., et al., “Prokaryotic homologs of Argonaute proteins are predicted to function as key components of a novel system of defense against mobile genetic elements”, Biol Direct. 2009 Aug. 25; 4:29. doi: 10.1186/1745-6150-4-29, the entire contents of which is hereby incorporated by reference. In some embodiments, the napDNAbp is a Marinitoga piezophila Argunaute (MpAgo) protein. The CRISPR-associated Marinitoga piezophila Argunaute (MpAgo) protein cleaves single-stranded target sequences using 5′-phosphorylated guides. The 5′ guides are used by all known Argonautes. The crystal structure of an MpAgo-RNA complex shows a guide strand binding site comprising residues that block 5′ phosphate interactions. This data suggests the evolution of an Argonaute subclass with noncanonical specificity for a 5′-hydroxylated guide. See, e.g., Kaya et al., “A bacterial Argonaute with noncanonical guide RNA specificity”, Proc Natl Acad Sci USA. 2016 Apr. 12; 113(15):4057-62, the entire contents of which are hereby incorporated by reference). It should be appreciated that other argonaute proteins may be used, and are within the scope of this disclosure.

[0230] In some embodiments, the napDNAbp is a single effector of a microbial CRISPR-Cas system. Single effectors of microbial CRISPR-Cas systems include, without limitation, Cas9, Cpf1, C2c1, C2c2, and C2c3. Typically, microbial CRISPR-Cas systems are divided into Class 1 and Class 2 systems. Class 1 systems have multisubunit effector complexes, while Class 2 systems have a single protein effector. For example, Cas9 and Cpf1 are Class 2 effectors. In addition to Cas9 and Cpf1, three distinct Class 2 CRISPR-Cas systems (C2c1, C2c2, and C2c3) have been described by Shmakov et al., “Discovery and Functional Characterization of Diverse Class 2 CRISPR Cas Systems”, Mol. Cell, 2015 Nov. 5; 60(3): 385-397, the entire contents of which is hereby incorporated by reference. Effectors of two of the systems, C2c1 and C2c3, contain RuvC-like endonuclease domains related to Cpf1. A third system, C2c2 contains an effector with two predicated HEPN RNase domains. Production of mature CRISPR RNA is tracrRNA-independent, unlike production of CRISPR RNA by C2c1. C2c1 depends on both CRISPR RNA and tracrRNA for DNA cleavage. Bacterial C2c2 has been shown to possess a unique RNase activity for CRISPR RNA maturation distinct from its RNA-activated single-stranded RNA degradation activity. These RNase functions are different from each other and from the CRISPR RNA-processing behavior of Cpf1. See, e.g., East-Seletsky, et al., “Two distinct RNase activities of CRISPR-C2c2 enable guide-RNA processing and RNA detection”, Nature, 2016 Oct. 13; 538(7624):270-273, the entire contents of which are hereby incorporated by reference. In vitro biochemical analysis of C2c2 in Leptotrichia shahii has shown that C2c2 is guided by a single CRISPR RNA and can be programed to cleave ssRNA targets carrying complementary protospacers. Catalytic residues in the two conserved HEPN domains mediate cleavage. Mutations in the catalytic residues generate catalytically inactive RNA-binding proteins. See e.g., Abudayyeh et al., “C2c2 is a single-component programmable RNA-guided RNA-targeting CRISPR effector”, Science, 2016 Aug. 5; 353(6299), the entire contents of which are hereby incorporated by reference.

[0231] The crystal structure of Alicyclobaccillus acidoterrastris C2c1 (AacC2c1) has been reported in complex with a chimeric single-molecule guide RNA (sgRNA). See e.g., Liu et al., “C2c1-sgRNA Complex Structure Reveals RNA-Guided DNA Cleavage Mechanism”, Mol. Cell, 2017 Jan. 19; 65(2):310-322, the entire contents of which are hereby incorporated by reference. The crystal structure has also been reported in Alicyclobacillus acidoterrestris C2c1 bound to target DNAs as ternary complexes. See e.g., Yang et al., “PAM-dependent Target DNA Recognition and Cleavage by C2C1 CRISPR-Cas endonuclease”, Cell, 2016 Dec. 15; 167(7):1814-1828, the entire contents of which are hereby incorporated by reference. Catalytically competent conformations of AacC2c1, both with target and non-target DNA strands, have been captured independently positioned within a single RuvC catalytic pocket, with C2c1-mediated cleavage resulting in a staggered seven-nucleotide break of target DNA. Structural comparisons between C2c1 ternary complexes and previously identified Cas9 and Cpf1 counterparts demonstrate the diversity of mechanisms used by CRISPR-Cas9 systems.

[0232] In some embodiments, the napDNAbp may be a C2c1, a C2c2, or a C2c3 protein. In some embodiments, the napDNAbp is a C2c1 protein. In some embodiments, the napDNAbp is a C2c2 protein. In some embodiments, the napDNAbp is a C2c3 protein. In some embodiments, the napDNAbp comprises an amino acid sequence that is at least 85%, at least 90%, at least 91%, at least 92%, at least 93%, at least 94%, at least 95%, at least 96%, at least 97%, at least 98%, at least 99%, or at least 99.5% identical to a naturally-occurring C2c1, C2c2, or C2c3 protein. In some embodiments, the napDNAbp is a naturally-occurring C2c1, C2c2, or C2c3 protein.

[0233] Some aspects of the disclosure provide Cas9 domains that have different PAM specificities. Typically, Cas9 proteins, such as Cas9 from S. pyogenes (spCas9), require a canonical NGG PAM sequence to bind a particular nucleic acid region. This may limit the ability to edit desired bases within a genome. In some embodiments, the base editing base editors provided herein may need to be placed at a precise location, for example where a target base is placed within a 4 base region (e.g., a “editing window” or a “target window”), which is approximately 15 bases upstream of the PAM. See Komor, A. C., et al., “Programmable editing of a target base in genomic DNA without double-stranded DNA cleavage” Nature 533, 420-424 (2016), the entire contents of which are hereby incorporated by reference. Accordingly, in some embodiments, any of the base editors provided herein may contain a Cas9 domain that is capable of binding a nucleotide sequence that does not contain a canonical (e.g., NGG) PAM sequence. Cas9 domains that bind to non-canonical PAM sequences have been described in the art and would be apparent to the skilled artisan. For example, Cas9 domains that bind non-canonical PAM sequences have been described in Kleinstiver, B. P., et al., “Engineered CRISPR-Cas9 nucleases with altered PAM specificities” Nature 523, 481-485 (2015); and Kleinstiver, B. P., et al., “Broadening the targeting range of Staphylococcus aureus CRISPR-Cas9 by modifying PAM recognition” Nature Biotechnology 33, 1293-1298 (2015); the entire contents of each are hereby incorporated by reference.

[0234] For example, a napDNAbp domain with altered PAM specificity, such as a domain with at least 80%, at least 85%, at least 90%, at least 95%, or at least 99% sequence identity with wild type Francisella novicida Cpf1 (SEQ ID NO: 218) (D91′7, E1006, and D1255), which has the following amino acid sequence:

(SEQ ID NO: 218)
MSIYQEFVNKYSLSKTLRFELIPQGKTLENIKARG
LILDDEKRAKDYKKAKQIIDKYHQFFIEEILSSVC
ISEDLLQNYSDVYFKLKKSDDDNLQKDFKSAKDTI
KKQISEYIKDSEKFKNLFNQNLIDAKKGQESDLIL
WLKQSKDNGIELFKANSDITDIDEALEIIKSFKGW
TTYFKGFHENRKNVYSSNDIPTSIIYRIVDDNLPK
FLENKAKYESLKDKAPEAINYEQIKKDLAEELTFD
IDYKTSEVNQRVFSLDEVFEIANFNNYLNQSGITK
FNTIIGGKFVNGENTKRKGINEYINLYSQQINDKT
LKKYKMSVLFKQILSDTESKSFVIDKLEDDSDVVT
TMQSFYEQIAAFKTVEEKSIKETLSLLFDDLKAQK
LDLSKIYFKNDKSLTDLSQQVFDDYSVIGTAVLEY
ITQQIAPKNLDNPSKKEQELIAKKTEKAKYLSLET
IKLALEEFNKHRDIDKQCRFEEILANFAAIPMIFD
EIAQNKDNLAQISIKYQNQGKKDLLQASAEDDVKA
IKDLLDQTNNLLHKLKIFHISQSEDKANILDKDEH
FYLVFEECYFELANIVPLYNKIRNYITQKPYSDEK
FKLNFENSTLANGWDKNKEPDNTAILFIKDDKYYL
GVMNKKNNKIFDDKAIKENKGEGYKKIVYKLLPGA
NKMLPKVFFSAKSIKFYNPSEDILRIRNHSTHTKN
GSPQKGYEKFEFNIEDCRKFIDFYKQSISKHPEWK
DFGFRFSDTQRYNSIDEFYREVENQGYKLTFENIS
ESYIDSVVNQGKLYLFQIYNKDFSAYSKGRPNLHT
LYWKALFDERNLQDVVYKLNGEAELFYRKQSIPKK
ITHPAKEAIANKNKDNPKKESVFEYDLIKDKRFTE
DKFFFHCPITINFKSSGANKFNDEINLLLKEKAND
VHILSIDRGERHLAYYTLVDGKGNIIKQDTFNIIG
NDRMKTNYHDKLAAIEKDRDSARKDWKKINNIKEM
KEGYLSQVVHEIAKLVIEYNAIVVFEDLNFGFKRG
RFKVEKQVYQKLEKMLIEKLNYLVFKDNEFDKTGG
VLRAYQLTAPFETFKKMGKQTGIIYYVPAGFTSKI
CPVTGFVNQLYPKYESVSKSQEFFSKFDKICYNLD
KGYFEFSFDYKNFGDKAAKGKWTIASFGSRLINFR
NSDKNHNWDTREVYPTKELEKLLKDYSIEYGHGEC
IKAAICGESDKKFFAKLTSVLNTILQMRNSKTGTE
LDYLISPVADVNGNFFDSRQAPKNMPQDADANGAY
HIGLKGLMLLGRIKNNQEGKKLNLVIKNEEYFEFV
QNRNN

[0235] An additional napDNAbp domain with altered PAM specificity, such as a domain having at least 80%, at least 85%, at least 90%, at least 95%, or at least 99% sequence identity with wild type Geobacillus thermodenitrificans Cas9 (SEQ ID NO: 217), which has the following amino acid sequence:

(SEQ ID NO: 217)
MKYKIGLDIGITSIGWAVINLDIPRIEDLGVRIFD
RAENPKTGESLALPRRLARSARRRLRRRKHRLERI
RRLFVREGILTKEELNKLFEKKHEIDVWQLRVEAL
DRKLNNDELARILLHLAKRRGFRSNRKSERTNKEN
STMLKHIEENQSILSSYRTVAEMVVKDPKFSLHKR
NKEDNYTNTVARDDLEREIKLIFAKQREYGNIVCT
EAFEHEYISIWASQRPFASKDDIEKKVGFCTFEPK
EKRAPKATYTFQSFTVWEHINKLRLVSPGGIRALT
DDERRLIYKQAFHKNKITFHDVRTLLNLPDDTRFK
GLLYDRNTTLKENEKVRFLELGAYHKIRKAIDSVY
GKGAAKSFRPIDFDTFGYALTMFKDDTDIRSYLRN
EYEQNGKRMENLADKVYDEELIEELLNLSFSKFGH
LSLKALRNILPYMEQGEVYSTACERAGYTFTGPKK
KQKTVLLPNIPPIANPVVMRALTQARKVVNAIIKK
YGSPVSIHIELARELSQSFDERRKMQKEQEGNRKK
NETAIRQLVEYGLTLNPTGLDIVKFKLWSEQNGKC
AYSLQPIEIERLLEPGYTEVDHVIPYSRSLDDSYT
NKVLVLTKENREKGNRTPAEYLGLGSERWQQFETF
VLTNKQFSKKKRDRLLRLHYDENEENEFKNRNLND
TRYISRFLANFIREHLKFADSDDKQKVYTVNGRIT
AHLRSRWNFNKNREESNLHHAVDAAIVACTTPSDI
ARVTAFYQRREQNKELSKKTDPQFPQPWPHFADEL
QARLSKNPKESIKALNLGNYDNEKLESLQPVFVSR
MPKRSITGAAHQETLRRYIGIDERSGKIQTVVKKK
LSEIQLDKTGHFPMYGKESDPRTYEAIRQRLLEHN
NDPKKAFQEPLYKPKKNGELGPIIRTIKIIDTTNQ
VIPLNDGKTVAYNSNIVRVDVFEKDGKYYCVPIYT
IDMMKGILPNKAIEPNKPYSEWKEMTEDYTFRFSL
YPNDLIRIEFPREKTIKTAVGEEIKIKDLFAYYQT
IDSSNGGLSLVSHDNNFSLRSIGSRTLKRFEKYQV
DVLGNIYKVRGEKRVGVASSSHSKAGETIRPL

[0236] In some embodiments, the nucleic acid programmable DNA binding protein (napDNAbp) is a nucleic acid programmable DNA binding protein that does not require a canonical (NGG) PAM sequence. In some embodiments, the napDNAbp is an argonaute protein. One example of such a nucleic acid programmable DNA binding protein is an Argonaute protein from Natronobacterium gregoryi (NgAgo). NgAgo is a ssDNA-guided endonuclease. NgAgo binds 5′ phosphorylated ssDNA of ˜24 nucleotides (gDNA) to guide it to its target site and will make DNA double-strand breaks at the gDNA site. In contrast to Cas9, the NgAgo-gDNA system does not require a protospacer-adjacent motif (PAM). Using a nuclease inactive NgAgo (dNgAgo) can greatly expand the bases that may be targeted. The characterization and use of NgAgo have been described in Gao et al., Nat Biotechnol., 34(7): 768-73 (2016), PubMed PMID: 27136078; Swarts et al., Nature, 507(7491): 258-61 (2014); and Swarts et al., Nucleic Acids Res. 43(10) (2015): 5120-9, each of which is incorporated herein by reference. The sequence of Natronobacterium gregoryi Argonaute is provided in SEQ ID NO: 219.

[0237] The disclosed base editors may comprise a napDNAbp domain having at least 80%, at least 85%, at least 90%, at least 95%, or at least 99% sequence identity with wild type Natronobacterium gregoryi Argonaute (SEQ ID NO: 219), which has the following amino acid sequence:

(SEQ ID NO: 219)
MTVIDLDSTTTADELTSGHTYDISVTLTGVYDNTD
EQHPRMSLAFEQDNGERRYITLWKNTTPKDVFTYD
YATGSTYIFTNIDYEVKDGYENLTATYQTTVENAT
AQEVGTTDEDETFAGGEPLDHHLDDALNETPDDAE
TESDSGHVMTSFASRDQLPEWTLHTYTLTATDGAK
TDTEYARRTLAYTVRQELYTDHDAAPVATDGLMLL
TPEPLGETPLDLDCGVRVEADETRTLDYTTAKDRL
LARELVEEGLKRSLWDDYLVRGIDEVLSKEPVLTC
DEFDLHERYDLSVEVGHSGRAYLHINFRHRFVPKL
TLADIDDDNIYPGLRVKTTYRPRRGHIVWGLRDEC
ATDSLNTLGNQSVVAYHRNNQTPINTDLLDAIEAA
DRRVVETRRQGHGDDAVSFPQELLAVEPNTHQIKQ
FASDGFHQQARSKTRLSASRCSEKAQAFAERLDPV
RLNGSTVEFSSEFFTGNNEQQLRLLYENGESVLTF
RDGARGAHPDETFSKGIVNPPESFEVAVVLPEQQA
DTCKAQWDTMADLLNQAGAPPTRSETVQYDAFSSP
ESISLNVAGAIDPSEVDAAFVVLPPDQEGFADLAS
PTETYDELKKALANMGIYSQMAYFDRFRDAKIFYT
RNVALGLLAAAGGVAFTTEHAMPGDADMFIGIDVS
RSYPEDGASGQINIAATATAVYKDGTILGHSSTRP
QLGEKLQSTDVRDIMKNAILGYQQVTGESPTHIVI
HRDGFMNEDLDPATEFLNEQGVEYDIVEIRKQPQT
RLLAVSDVQYDTPVKSIAAINQNEPRATVATFGAP
EYLATRDGGGLPRPIQIERVAGETDIETLTRQVYL
LSQSHIQVHNSTARLPITTAYADQASTHATKGYLV
QTGAFESNVGFL

### Cas9 Circular Permutants

[0238] In various embodiments, the base editors disclosed herein may comprise a circular permutant of Cas9.

[0239] The term “circularly permuted Cas9” or “circular permutant” of Cas9 or “CP-Cas9”) refers to any Cas9 protein, or variant thereof, that occurs or has been modify to engineered as a circular permutant variant, which means the N-terminus and the C-terminus of a Cas9 protein (e.g., a wild type Cas9 protein) have been topically rearranged. Such circularly permuted Cas9 proteins, or variants thereof, retain the ability to bind DNA when complexed with a guide RNA (gRNA). See, Oakes et al., “Protein Engineering of Cas9 for enhanced function,” Methods Enzymol, 2014, 546: 491-511 and Oakes et al., “CRISPR-Cas9 Circular Permutants as Programmable Scaffolds for Genome Modification,” Cell, Jan. 10, 2019, 176: 254-267, and Huang, T. P. et al. Circularly permuted and PAM-modified Cas9 variants broaden the targeting scope of base editors. Nat. Biotechnol. 37, 626-631 (2019). each of are incorporated herein by reference. Reference is also made to International Publication No. WO 2020/041751, published Feb. 27, 2020, herein incorporated by reference. The instant disclosure contemplates any previously known CP-Cas9 or use a new CP-Cas9 so long as the resulting circularly permuted protein retains the ability to bind DNA when complexed with a guide RNA (gRNA).

[0240] Any of the Cas9 proteins described herein, including any variant, ortholog, or naturally occurring Cas9 or equivalent thereof, may be reconfigured as a circular permutant variant.

[0241] In various embodiments, the circular permutants of Cas9 may have the following structure: N-terminus-[original C-terminus]-[optional linker]-[original N-terminus]-C-terminus.

[0242] As an example, the present disclosure contemplates the following circular permutants of canonical S. pyogenes Cas9 (1368 amino acids of UniProtKB-Q99ZW2 (CAS9_STRP1) (numbering is based on the amino acid position in SEQ ID NO: 213)): N-terminus-[1268-1368]-[optional linker]-[1-1267]-C-terminus; N-terminus-[1168-1368]-[optional linker]-[1-1167]-C-terminus; N-terminus-[1068-1368]-[optional linker]-[1-1067]-C-terminus; N-terminus-[968-1368]-[optional linker]-[1-967]-C-terminus; N-terminus-[868-1368]-[optional linker]-[1-867]-C-terminus; N-terminus-[768-1368]-[optional linker]-[1-767]-C-terminus; N-terminus-[668-1368]-[optional linker]-[1-667]-C-terminus; N-terminus-[568-1368]-[optional linker]-[1-567]-C-terminus; N-terminus-[468-1368]-[optional linker]-[1-467]-C-terminus; N-terminus-[368-1368]-[optional linker]-[1-367]-C-terminus; N-terminus-[268-1368]-[optional linker]-[1-267]-C-terminus; N-terminus-[168-1368]-[optional linker]-[1-167]-C-terminus; N-terminus-[68-1368]-[optional linker]-[1-67]-C-terminus; or N-terminus-[10-1368]-[optional linker]-[1-9]-C-terminus; or the corresponding circular permutants of other Cas9 proteins (including other Cas9 orthologs, variants, etc).

[0243] In particular embodiments, the circular permuant Cas9 has the following structure (based on S. pyogenes Cas9 (1368 amino acids of UniProtKB-Q99ZW2 (CAS9_STRP1) (numbering is based on the amino acid position in SEQ ID NO: 213): N-terminus-[102-1368]-[optional linker]-[1-101]-C-terminus; N-terminus-[1028-1368]-[optional linker]-[1-1027]-C-terminus; N-terminus-[1041-1368]-[optional linker]-[1-1043]-C-terminus; N-terminus-[1249-1368]-[optional linker]-[1-1248]-C-terminus; or N-terminus-[1300-1368]-[optional linker]-[1-1299]-C-terminus; or the corresponding circular permutants of other Cas9 proteins (including other Cas9 orthologs, variants, etc).

[0244] In still other embodiments, the circular permuant Cas9 has the following structure (based on S. pyogenes Cas9 (1368 amino acids of UniProtKB-Q99ZW2 (CAS9_STRP1) (numbering is based on the amino acid position in SEQ ID NO: 213): N-terminus-[103-1368]-[optional linker]-[1-102]-C-terminus; N-terminus-[1029-1368]-[optional linker]-[1-1028]-C-terminus; N-terminus-[1042-1368]-[optional linker]-[1-1041]-C-terminus; N-terminus-[1250-1368]-[optional linker]-[1-1249]-C-terminus; or N-terminus-[1301-1368]-[optional linker]-[1-1300]-C-terminus; or the corresponding circular permutants of other Cas9 proteins (including other Cas9 orthologs, variants, etc.).

[0245] In some embodiments, the circular permutant can be formed by linking a C-terminal fragment of a Cas9 to an N-terminal fragment of a Cas9, either directly or by using a linker, such as an amino acid linker. In some embodiments, the C-terminal fragment may correspond to the C-terminal 95% or more of the amino acids of a Cas9 (e.g., amino acids about 1300-1368), or the C-terminal 90%, 85%, 80%, 75%, 70%, 65%, 60%, 55%, 50%, 45%, 40%, 35%, 30%, 25%, 20%, 15%, 10%, 5%, or less of a Cas9. The N-terminal portion may correspond to the N-terminal 95% or more of the amino acids of a Cas9 (e.g., amino acids about 1-1300), or the N-terminal 90%, 85%, 80%, 75%, 70%, 65%, 60%, 55%, 50%, 45%, 40%, 35%, 30%, 25%, 20%, 15%, 10%, 5%, or less of a Cas9 (e.g., of SEQ ID NO: 213).

[0246] In some embodiments, the circular permutant can be formed by linking a C-terminal fragment of a Cas9 to an N-terminal fragment of a Cas9, either directly or by using a linker, such as an amino acid linker. In some embodiments, the C-terminal fragment that is rearranged to the N-terminus includes or corresponds to the C-terminal 30% or less of the amino acids of a Cas9 (e.g., amino acids 1012-1368 of SEQ ID NO: 213). In some embodiments, the C-terminal fragment that is rearranged to the N-terminus, includes or corresponds to the C-terminal 30%, 29%, 28%, 27%, 26%, 25%, 24%, 23%, 22%, 21%, 20%, 19%, 18%, 17%, 16%, 15%, 14%, 13%, 12%, 11%, 10%, 9%, 8%, 7%, 6%, 5%, 4%, 3%, 2%, or 1% of the amino acids of a Cas9 (e.g., the Cas9 of SEQ ID NO: 213). In some embodiments, the C-terminal fragment that is rearranged to the N-terminus includes or corresponds to the C-terminal 410 residues or less of a Cas9 (e.g., the Cas9 of SEQ ID NO: 213). In some embodiments, the C-terminal portion that is rearranged to the N-terminus includes or corresponds to the C-terminal 410, 400, 390, 380, 370, 360, 350, 340, 330, 320, 310, 300, 290, 280, 270, 260, 250, 240, 230, 220, 210, 200, 190, 180, 170, 160, 150, 140, 130, 120, 110, 100, 90, 80, 70, 60, 50, 40, 30, 20, or 10 residues of a Cas9 (e.g., the Cas9 of SEQ ID NO: 213). In some embodiments, the C-terminal portion that is rearranged to the N-terminus includes or corresponds to the C-terminal 357, 341, 328, 120, or 69 residues of a Cas9 (e.g., the Cas9 of SEQ ID NO: 213).

[0247] In other embodiments, circular permutant Cas9 variants may be defined as a topological rearrangement of a Cas9 primary structure based on the following method, which is based on S. pyogenes Cas9 of SEQ ID NO: 213: (a) selecting a circular permutant (CP) site corresponding to an internal amino acid residue of the Cas9 primary structure, which dissects the original protein into two halves: an N-terminal region and a C-terminal region; (b) modifying the Cas9 protein sequence (e.g., by genetic engineering techniques) by moving the original C-terminal region (comprising the CP site amino acid) to preceed the original N-terminal region, thereby forming a new N-terminus of the Cas9 protein that now begins with the CP site amino acid residue. The CP site can be located in any domain of the Cas9 protein, including, for example, the helical-II domain, the RuvCIII domain, or the CTD domain. For example, the CP site may be located (relative the S. pyogenes Cas9 of SEQ ID NO: 213) at original amino acid residue 181, 199, 230, 270, 310, 1010, 1016, 1023, 1029, 1041, 1247, 1249, or 1282. Thus, once relocated to the N-terminus, original amino acid 181, 199, 230, 270, 310, 1010, 1016, 1023, 1029, 1041, 1247, 1249, or 1282 would become the new N-terminal amino acid. Nomenclature of these CP-Cas9 proteins may be referred to as Cas9-CP¹⁸¹, Cas9-CP¹⁹⁹, Cas9-CP²³⁰, Cas9-CP²⁷⁰, Cas9-CP³¹⁰, Cas9-CP¹⁰¹⁰, Cas9-CP¹⁰¹⁶, Cas9-CP¹⁰²³, Cas9-CP¹⁰²⁹, Cas9-CP¹⁰⁴¹, Cas9-CP¹²⁴⁷, Cas9-CP¹²⁴⁹, and Cas9-CP¹²⁸², respectively. This description is not meant to be limited to making CP variants from SEQ ID NO: 213, but may be implemented to make CP variants of any Cas9 sequence, either at CP sites that correspond to these positions, or at other CP sites entirely. This description is not meant to limit the specific CP sites in any way. Virtually any CP site may be used to form a CP-Cas9 variant.

[0248] Exemplary CP-Cas9 amino acid sequences, based on the Cas9 of SEQ ID NO: 213, are provided below in which linker sequences are indicated by underlining and optional methionine (M) residues are indicated in bold. It should be appreciated that the disclosure provides CP-Cas9 sequences that do not include a linker sequence, or that include different linker sequences. It should be appreciated that CP-Cas9 sequences may be based on Cas9 sequences other than that of SEQ ID NO: 213 and any examples provided herein are not meant to be limiting. Exemplary CP-Cas9 sequences are as follows:

| CP name | Sequence | SEQ ID NO: |
|---|---|---|
| CP1012 | DYKVYDVRKMIAKSEQEIGKATAKYFFYSNIMNFFKTEITLANGEIRKRPLIETN | SEQ ID NO: |
| | GETGEIVWDKGRDFATVRKVLSMPQVNIVKKTEVQTGGFSKESILPKRNSDKLIA | 225 |
| | RKKDWDPKKYGGFDSPTVAYSVLVVAKVEKGKSKKLKSVKELLGITIMERSSEEK | |
| | NPIDFLEAKGYKEVKKDLIIKLPKYSLFELENGRKRMLASAGELQKGNELALPSK | |
| | YVNFLYLASHYEKLKGSPEDNEQKQLFVEQHKHYLDEIIEQISEFSKRVILADAN | |
| | LDKVLSAYNKHRDKPIREQAENIIHLFTLTNLGAPAAFKYFDTTIDRKRYTSTKE | |
| | VLDATLIHQSITGLYETRIDLSQLGGDGGSGGSGGSGGSGGSGGSGGDKKYSIGL | |
| | AIGTNSVGWAVITDEYKVPSKKFKVLGNTDRHSIKKNLIGALLFDSGETAEATRL | |
| | KRTARRRYTRRKNRICYLQEIFSNEMAKVDDSFFHRLEESFLVEEDKKHERHPIF | |
| | GNIVDEVAYHEKYPTIYHLRKKLVDSTDKADLRLIYLALAHMIKFRGHFLIEGDL | |
| | NPDNSDVDKLFIQLVQTYNQLFEENPINASGVDAKAILSARLSKSRRLENLIAQL | |
| | PGEKKNGLFGNLIALSLGLTPNFKSNFDLAEDAKLQLSKDTYDDDLDNLLAQIGD | |
| | QYADLFLAAKNLSDAILLSDILRVNTEITKAPLSASMIKRYDEHHQDLTLLKALV | |
| | RQQLPEKYKEIFFDQSKNGYAGYIDGGASQEEFYKFIKPILEKMDGTEELLVKLN | |
| | REDLLRKQRTFDNGSIPHQIHLGELHAILRRQEDFYPFLKDNREKIEKILTFRIP | |
| | YYVGPLARGNSRFAWMTRKSEETITPWNFEEVVDKGASAQSFIERMTNFDKNLPN | |
| | EKVLPKHSLLYEYFTVYNELTKVKYVTEGMRKPAFLSGEQKKAIVDLLFKTNRKV | |
| | TVKQLKEDYFKKIECFDSVEISGVEDRFNASLGTYHDLLKIIKDKDFLDNEENED | |
| | ILEDIVLTLTLFEDREMIEERLKTYAHLFDDKVMKQLKRRRYTGWGRLSRKLING | |
| | IRDKQSGKTILDFLKSDGFANRNFMQLIHDDSLTFKEDIQKAQVSGQGDSLHEHI | |
| | ANLAGSPAIKKGILQTVKVVDELVKVMGRHKPENIVIEMARENQTTQKGQKNSRE | |
| | RMKRIEEGIKELGSQILKEHPVENTQLQNEKLYLYYLQNGRDMYVDQELDINRLS | |
| | DYDVDHIVPQSFLKDDSIDNKVLTRSDKNRGKSDNVPSEEVVKKMKNYWRQLLNA | |
| | KLITQRKFDNLTKAERGGLSELDKAGFIKRQLVETRQITKHVAQILDSRMNTKYD | |
| | ENDKLIREVKVITLKSKLVSDFRKDFQFYKVREINNYHHAHDAYLNAVVGTALIK | |
| | KYPKLESEFVYG | |
| CP1028 | EIGKATAKYFFYSNIMNFFKTEITLANGEIRKRPLIETNGETGEIVWDKGRDFAT | SEQ ID NO: |
| | VRKVLSMPQVNIVKKTEVQTGGFSKESILPKRNSDKLIARKKDWDPKKYGGFDSP | 226 |
| | TVAYSVLVVAKVEKGKSKKLKSVKELLGITIMERSSFEKNPIDFLEAKGYKEVKK | |
| | DLIIKLPKYSLFELENGRKRMLASAGELQKGNELALPSKYVNFLYLASHYEKLKG | |
| | SPEDNEQKQLFVEQHKHYLDEIIEQISEFSKRVILADANLDKVLSAYNKHRDKPI | |
| | REQAENIIHLFTLTNLGAPAAFKYFDTTIDRKRYTSTKEVLDATLIHQSITGLYE | |
| | TRIDLSQLGGDGGSGGSGGSGGSGGSGGSGGMDKKYSIGLAIGTNSVGWAVITDE | |
| | YKVPSKKFKVLGNTDRHSIKKNLIGALLFDSGETAEATRLKRTARRRYTRRKNRI | |
| | CYLQEIFSNEMAKVDDSFFHRLEESFLVEEDKKHERHPIFGNIVDEVAYHEKYPT | |
| | IYHLRKKLVDSTDKADLRLIYLALAHMIKFRGHFLIEGDLNPDNSDVDKLFIQLV | |
| | QTYNQLFEENPINASGVDAKAILSARLSKSRRLENLIAQLPGEKKNGLFGNLIAL | |
| | SLGLTPNFKSNFDLAEDAKLQLSKDTYDDDLDNLLAQIGDQYADLFLAAKNLSDA | |
| | ILLSDILRVNTEITKAPLSASMIKRYDEHHQDLTLLKALVRQQLPEKYKEIFFDQ | |
| | SKNGYAGYIDGGASQEEFYKFIKPILEKMDGTEELLVKLNREDLLRKQRTFDNGS | |
| | IPHQIHLGELHAILRRQEDFYPFLKDNREKIEKILTFRIPYYVGPLARGNSRFAW | |
| | MTRKSEETITPWNFEEVVDKGASAQSFIERMTNFDKNLPNEKVLPKHSLLYEYFT | |
| | VYNELTKVKYVTEGMRKPAFLSGEQKKAIVDLLFKTNRKVTVKQLKEDYFKKIEC | |
| | FDSVEISGVEDRFNASLGTYHDLLKIIKDKDFLDNEENEDILEDIVLTLTLFEDR | |
| | EMIEERLKTYAHLFDDKVMKQLKRRRYTGWGRLSRKLINGIRDKQSGKTILDFLK | |
| | SDGFANRNFMQLIHDDSLTFKEDIQKAQVSGQGDSLHEHIANLAGSPAIKKGILQ | |
| | TVKVVDELVKVMGRHKPENIVIEMARENQTTQKGQKNSRERMKRIEEGIKELGSQ | |
| | ILKEHPVENTQLQNEKLYLYYLQNGRDMYVDQELDINRLSDYDVDHIVPQSFLKD | |
| | DSIDNKVLTRSDKNRGKSDNVPSEEVVKKMKNYWRQLLNAKLITQRKFDNLTKAE | |
| | RGGLSELDKAGFIKRQLVETRQITKHVAQILDSRMNTKYDENDKLIREVKVITLK | |
| | SKLVSDFRKDFQFYKVREINNYHHAHDAYLNAVVGTALIKKYPKLESEFVYGDYK | |
| | VYDVRKMIAKSEQ | |
| CP1041 | NIMNFFKTEITLANGEIRKRPLIETNGETGEIVWDKGRDFATVRKVLSMPQVNIV | SEQ ID NO: |
| | KKTEVQTGGFSKESILPKRNSDKLIARKKDWDPKKYGGFDSPTVAYSVLVVAKVE | 227 |
| | KGKSKKLKSVKELLGITIMERSSFEKNPIDFLEAKGYKEVKKDLIIKLPKYSLFE | |
| | LENGRKRMLASAGELQKGNELALPSKYVNFLYLASHYEKLKGSPEDNEQKQLFVE | |
| | QHKHYLDEIIEQISEFSKRVILADANLDKVLSAYNKHRDKPIREQAENIIHLFTL | |
| | TNLGAPAAFKYFDTTIDRKRYTSTKEVLDATLIHQSITGLYETRIDLSQLGGDGG | |
| | SGGSGGSGGSGGSGGSGGDKKYSIGLAIGTNSVGWAVITDEYKVPSKKFKVLGNT | |
| | DRHSIKKNLIGALLFDSGETAEATRLKRTARRRYTRRKNRICYLQEIFSNEMAKV | |
| | DDSFFHRLEESFLVEEDKKHERHPIFGNIVDEVAYHEKYPTIYHLRKKLVDSTDK | |
| | ADLRLIYLALAHMIKFRGHFLIEGDLNPDNSDVDKLFIQLVQTYNQLFEENPINA | |
| | SGVDAKAILSARLSKSRRLENLIAQLPGEKKNGLFGNLIALSLGLTPNFKSNFDL | |
| | AEDAKLQLSKDTYDDDLDNLLAQIGDQYADLFLAAKNLSDAILLSDILRVNTEIT | |
| | KAPLSASMIKRYDEHHQDLTLLKALVRQQLPEKYKEIFFDQSKNGYAGYIDGGAS | |
| | QEEFYKFIKPILEKMDGTEELLVKLNREDLLRKQRTFDNGSIPHQIHLGELHAIL | |
| | RRQEDFYPFLKDNREKIEKILTFRIPYYVGPLARGNSRFAWMTRKSEETITPWNF | |
| | EEVVDKGASAQSFIERMTNFDKNLPNEKVLPKHSLLYEYFTVYNELTKVKYVTEG | |
| | MRKPAFLSGEQKKAIVDLLFKTNRKVTVKQLKEDYFKKIECFDSVEISGVEDRFN | |
| | ASLGTYHDLLKIIKDKDFLDNEENEDILEDIVLTLTLFEDREMIEERLKTYAHLF | |
| | DDKVMKQLKRRRYTGWGRLSRKLINGIRDKQSGKTILDFLKSDGFANRNFMQLIH | |
| | DDSLTFKEDIQKAQVSGQGDSLHEHIANLAGSPAIKKGILQTVKVVDELVKVMGR | |
| | HKPENIVIEMARENQTTQKGQKNSRERMKRIEEGIKELGSQILKEHPVENTQLQN | |
| | EKLYLYYLQNGRDMYVDQELDINRLSDYDVDHIVPQSFLKDDSIDNKVLTRSDKN | |
| | RGKSDNVPSEEVVKKMKNYWRQLLNAKLITQRKFDNLTKAERGGLSELDKAGFIK | |
| | RQLVETRQITKHVAQILDSRMNTKYDENDKLIREVKVITLKSKLVSDFRKDFQFY | |
| | KVREINNYHHAHDAYLNAVVGTALIKKYPKLESEFVYGDYKVYDVRKMIAKSEQE | |
| | IGKATAKYFFYS | |
| CP1249 | PEDNEQKQLFVEQHKHYLDEIIEQISEFSKRVILADANLDKVLSAYNKHRDKPIR | SEQ ID NO: |
| | EQAENIIHLFTLTNLGAPAAFKYFDTTIDRKRYTSTKEVLDATLIHQSITGLYET | 228 |
| | RIDLSQLGGDGGSGGSGGSGGSGGSGGSGGMDKKYSIGLAIGTNSVGWAVITDEY | |
| | KVPSKKFKVLGNTDRHSIKKNLIGALLFDSGETAEATRLKRTARRRYTRRKNRIC | |
| | YLQEIFSNEMAKVDDSFFHRLEESFLVEEDKKHERHPIFGNIVDEVAYHEKYPTI | |
| | YHLRKKLVDSTDKADLRLIYLALAHMIKFRGHFLIEGDLNPDNSDVDKLFIQLVQ | |
| | TYNQLFEENPINASGVDAKAILSARLSKSRRLENLIAQLPGEKKNGLFGNLIALS | |
| | LGLTPNFKSNFDLAEDAKLQLSKDTYDDDLDNLLAQIGDQYADLFLAAKNLSDAI | |
| | LLSDILRVNTEITKAPLSASMIKRYDEHHQDLTLLKALVRQQLPEKYKEIFFDQS | |
| | KNGYAGYIDGGASQEEFYKFIKPILEKMDGTEELLVKLNREDLLRKQRTFDNGSI | |
| | PHQIHLGELHAILRRQEDFYPFLKDNREKIEKILTFRIPYYVGPLARGNSRFAWM | |
| | TRKSEETITPWNFEEVVDKGASAQSFIERMTNFDKNLPNEKVLPKHSLLYEYFTV | |
| | YNELTKVKYVTEGMRKPAFLSGEQKKAIVDLLFKTNRKVTVKQLKEDYFKKIECF | |
| | DSVEISGVEDRFNASLGTYHDLLKIIKDKDFLDNEENEDILEDIVLTLTLFEDRE | |
| | MIEERLKTYAHLFDDKVMKQLKRRRYTGWGRLSRKLINGIRDKQSGKTILDFLKS | |
| | DGFANRNFMQLIHDDSLTFKEDIQKAQVSGQGDSLHEHIANLAGSPAIKKGILQT | |
| | VKVVDELVKVMGRHKPENIVIEMARENQTTQKGQKNSRERMKRIEEGIKELGSQI | |
| | LKEHPVENTQLQNEKLYLYYLQNGRDMYVDQELDINRLSDYDVDHIVPQSFLKDD | |
| | SIDNKVLTRSDKNRGKSDNVPSEEVVKKMKNYWRQLLNAKLITQRKFDNLTKAER | |
| | GGLSELDKAGFIKRQLVETRQITKHVAQILDSRMNTKYDENDKLIREVKVITLKS | |
| | KLVSDFRKDFQFYKVREINNYHHAHDAYLNAVVGTALIKKYPKLESEFVYGDYKV | |
| | YDVRKMIAKSEQEIGKATAKYFFYSNIMNFFKTEITLANGEIRKRPLIETNGETG | |
| | EIVWDKGRDFATVRKVLSMPQVNIVKKTEVQTGGFSKESILPKRNSDKLIARKKD | |
| | WDPKKYGGFDSPTVAYSVLVVAKVEKGKSKKLKSVKELLGITIMERSSFEKNPID | |
| | FLEAKGYKEVKKDLIIKLPKYSLFELENGRKRMLASAGELQKGNELALPSKYVNF | |
| | LYLASHYEKLKGS | |
| CP1300 | KPIREQAENIIHLFTLTNLGAPAAFKYFDTTIDRKRYTSTKEVLDATLIHQSITG | SEQ ID NO: |
| | LYETRIDLSQLGGDGGSGGSGGSGGSGGSGGSGGDKKYSIGLAIGTNSVGWAVIT | 229 |
| | DEYKVPSKKFKVLGNTDRHSIKKNLIGALLFDSGETAEATRLKRTARRRYTRRKN | |
| | RICYLQEIFSNEMAKVDDSFFHRLEESFLVEEDKKHERHPIFGNIVDEVAYHEKY | |
| | PTIYHLRKKLVDSTDKADLRLIYLALAHMIKFRGHFLIEGDLNPDNSDVDKLFIQ | |
| | LVQTYNQLFEENPINASGVDAKAILSARLSKSRRLENLIAQLPGEKKNGLFGNLI | |
| | ALSLGLTPNFKSNFDLAEDAKLQLSKDTYDDDLDNLLAQIGDQYADLFLAAKNLS | |
| | DAILLSDILRVNTEITKAPLSASMIKRYDEHHQDLTLLKALVRQQLPEKYKEIFF | |
| | DQSKNGYAGYIDGGASQEEFYKFIKPILEKMDGTEELLVKLNREDLLRKQRTFDN | |
| | GSIPHQIHLGELHAILRRQEDFYPFLKDNREKIEKILTFRIPYYVGPLARGNSRF | |
| | AWMTRKSEETITPWNFEEVVDKGASAQSFIERMTNFDKNLPNEKVLPKHSLLYEY | |
| | FTVYNELTKVKYVTEGMRKPAFLSGEQKKAIVDLLFKTNRKVTVKQLKEDYFKKI | |
| | ECFDSVEISGVEDRFNASLGTYHDLLKIIKDKDFLDNEENEDILEDIVLTLTLFE | |
| | DREMIEERLKTYAHLFDDKVMKQLKRRRYTGWGRLSRKLINGIRDKQSGKTILDF | |
| | LKSDGFANRNFMQLIHDDSLTFKEDIQKAQVSGQGDSLHEHIANLAGSPAIKKGI | |
| | LQTVKVVDELVKVMGRHKPENIVIEMARENQTTQKGQKNSRERMKRIEEGIKELG | |
| | SQILKEHPVENTQLQNEKLYLYYLQNGRDMYVDQELDINRLSDYDVDHIVPQSFL | |
| | KDDSIDNKVLTRSDKNRGKSDNVPSEEVVKKMKNYWRQLLNAKLITQRKFDNLTK | |
| | AERGGLSELDKAGFIKRQLVETRQITKHVAQILDSRMNTKYDENDKLIREVKVIT | |
| | LKSKLVSDFRKDFQFYKVREINNYHHAHDAYLNAVVGTALIKKYPKLESEFVYGD | |
| | YKVYDVRKMIAKSEQEIGKATAKYFFYSNIMNFFKTEITLANGEIRKRPLIETNG | |
| | ETGEIVWDKGRDFATVRKVLSMPQVNIVKKTEVQTGGFSKESILPKRNSDKLIAR | |
| | KKDWDPKKYGGFDSPTVAYSVLVVAKVEKGKSKKLKSVKELLGITIMERSSFEKN | |
| | PIDFLEAKGYKEVKKDLIIKLPKYSLFELENGRKRMLASAGELQKGNELALPSKY | |
| | VNFLYLASHYEKLKGSPEDNEQKQLFVEQHKHYLDEIIEQISEFSKRVILADANL | |
| | DKVLSAYNKHRD | |

[0249] The Cas9 circular permutants that may be useful in the base editor constructs described herein. Exemplary C-terminal fragments of Cas9, based on the Cas9 of SEQ ID NO: 213, which may be rearranged to an N-terminus of Cas9, are provided below. It should be appreciated that such C-terminal fragments of Cas9 are exemplary and are not meant to be limiting. These exemplary CP-Cas9 fragments have the following sequences:

| CP name | Sequence | SEQ ID NO: |
|---|---|---|
| CP1012 c- | DYKVYDVRKMIAKSEQEIGKATAKYFFYSNIMNFFKTEITLANGEIRKRPLIETN | SEQ ID NO: 57 |
| terminal | GETGEIVWDKGRDFATVRKVLSMPQVNIVKKTEVQTGGFSKESILPKRNSDKLIA | |
| fragment | RKKDWDPKKYGGFDSPTVAYSVLVVAKVEKGKSKKLKSVKELLGITIMERSSFEK | |
| | NPIDFLEAKGYKEVKKDLIIKLPKYSLFELENGRKRMLASAGELQKGNELALPSK | |
| | YVNFLYLASHYEKLKGSPEDNEQKQLFVEQHKHYLDEIIEQISEFSKRVILADAN | |
| | LDKVLSAYNKHRDKPIREQAENIIHLFTLTNLGAPAAFKYFDTTIDRKRYTSTKE | |
| | VLDATLIHQSITGLYETRIDLSQLGGD | |
| CP1028 c- | EIGKATAKYFFYSNIMNFFKTEITLANGEIRKRPLIETNGETGEIVWDKGRDFAT | SEQ ID NO: 70 |
| terminal | VRKVLSMPQVNIVKKTEVQTGGFSKESILPKRNSDKLIARKKDWDPKKYGGFDSP | |
| fragment | TVAYSVLVVAKVEKGKSKKLKSVKELLGITIMERSSFEKNPIDFLEAKGYKEVKK | |
| | DLIIKLPKYSLFELENGRKRMLASAGELQKGNELALPSKYVNFLYLASHYEKLKG | |
| | SPEDNEQKQLFVEQHKHYLDEIIEQISEFSKRVILADANLDKVLSAYNKHRDKPI | |
| | REQAENIIHLFTLTNLGAPAAFKYFDTTIDRKRYTSTKEVLDATLIHQSITGLYE | |
| | TRIDLSQLGGD | |
| CP1041 c- | NIMNFFKTEITLANGEIRKRPLIETNGETGEIVWDKGRDFATVRKVLSMPQVNIV | SEQ ID NO: 77 |
| terminal | KKTEVQTGGFSKESILPKRNSDKLIARKKDWDPKKYGGFDSPTVAYSVLVVAKVE | |
| fragment | KGKSKKLKSVKELLGITIMERSSFEKNPIDFLEAKGYKEVKKDLIIKLPKYSLFE | |
| | LENGRKRMLASAGELQKGNELALPSKYVNFLYLASHYEKLKGSPEDNEQKQLFVE | |
| | QHKHYLDEIIEQISEFSKRVILADANLDKVLSAYNKHRDKPIREQAENIIHLFTL | |
| | TNLGAPAAFKYFDTTIDRKRYTSTKEVLDATLIHQSITGLYETRIDLSQLGGD | |
| CP1249 c- | PEDNEQKQLFVEQHKHYLDEIIEQISEFSKRVILADANLDKVLSAYNKHRDKPIR | SEQ ID NO: 78 |
| terminal | EQAENIIHLFTLTNLGAPAAFKYFDTTIDRKRYTSTKEVLDATLIHQSITGLYET | |
| fragment | RIDLSQLGGD | |
| CP1300 c- | KPIREQAENIIHLFTLTNLGAPAAFKYFDTTIDRKRYTSTKEVLDATLIHQSITG | SEQ ID NO: 79 |
| terminal | LYETRIDLSQLGGD | |
| fragment | | |

Cas9 Variants with Modified PAM Specificities

[0250] The base editors of the present disclosure may also comprise Cas9 variants with modified PAM specificities. In some embodiments, the Cas9 variants have expanded, or broadened, PAM specificities.

[0251] In particular embodiments, the disclosed base editors comprise a S. pyogenes Cas9-NG variant that recognizes an expanded PAM, i.e., most NG PAM sites. This variant was first reported in Nishimasu et al., Science 361, 1259-1262 (2018), incorporated herein by reference. Accordingly, in some embodiments, the base editors comprise a napDNAbp domain that comprises an amino acid sequence that is at least 85%, at least 90%, at least 91%, at least 92%, at least 93%, at least 94%, at least 95%, at least 96%, at least 97%, at least 98%, at least 99%, or at least 99.5% identical to the SpCas9-NG set forth in SEQ ID NO: 235 below.

(SEQ ID NO: 235)
MDKKYSIGLAIGTNSVGWAVITDEYKVPSKKFKVLGNTDRHSIKKNLIGA
LLFDSGETAEATRLKRTARRRYTRRKNRICYLQEIFSNEMAKVDDSFFHR
LEESFLVEEDKKHERHPIFGNIVDEVAYHEKYPTIYHLRKKLVDSTDKAD
LRLIYLALAHMIKFRGHFLIEGDLNPDNSDVDKLFIQLVQTYNQLFEENP
INASGVDAKAILSARLSKSRRLENLIAQLPGEKKNGLFGNLIALSLGLTP
NFKSNFDLAEDAKLQLSKDTYDDDLDNLLAQIGDQYADLFLAAKNLSDAI
LLSDILRVNTEITKAPLSASMIKRYDEHHQDLTLLKALVRQQLPEKYKEI
FFDQSKNGYAGYIDGGASQEEFYKFIKPILEKMDGTEELLVKLNREDLLR
KQRTFDNGSIPHQIHLGELHAILRRQEDFYPFLKDNREKIEKILTFRIPY
YVGPLARGNSRFAWMTRKSEETITPWNFEEVVDKGASAQSFIERMTNFDK
NLPNEKVLPKHSLLYEYFTVYNELTKVKYVTEGMRKPAFLSGEQKKAIVD
LLFKTNRKVTVKQLKEDYFKKIECFDSVEISGVEDRFNASLGTYHDLLKI
IKDKDFLDNEENEDILEDIVLTLTLFEDREMIEERLKTYAHLFDDKVMKQ
LKRRRYTGWGRLSRKLINGIRDKQSGKTILDFLKSDGFANRNFMQLIHDD
SLTFKEDIQKAQVSGQGDSLHEHIANLAGSPAIKKGILQTVKVVDELVKV
MGRHKPENIVIEMARENQTTQKGQKNSRERMKRIEEGIKELGSQILKEHP
VENTQLQNEKLYLYYLQNGRDMYVDQELDINRLSDYDVDHIVPQSFLKDD
SIDNKVLTRSDKNRGKSDNVPSEEVVKKMKNYWRQLLNAKLITQRKFDNL
TKAERGGLSELDKAGFIKRQLVETRQITKHVAQILDSRMNTKYDENDKLI
REVKVITLKSKLVSDFRKDFQFYKVREINNYHHAHDAYLNAVVGTALIKK
YPKLESEFVYGDYKVYDVRKMIAKSEQEIGKATAKYFFYSNIMNFFKTEI
TLANGEIRKRPLIETNGETGEIVWDKGRDFATVRKVLSMPQVNIVKKTEV
QTGGFSKESIRPKRNSDKLIARKKDWDPKKYGGFVSPTVAYSVLVVAKVE
KGKSKKLKSVKELLGITIMERSSFEKNPIDFLEAKGYKEVKKDLIIKLPK
YSLFELENGRKRMLASARFLQKGNELALPSKYVNFLYLASHYEKLKGSPE
DNEQKQLFVEQHKHYLDEIIEQISEFSKRVILADANLDKVLSAYNKHRDK
PIREQAENIIHLFTLTNLGAPRAFKYFDTTIDRKVYRSTKEVLDATLIHQ
SITGLYETRIDLSQLGGD

[0252] Some aspects of this disclosure provide Cas9 proteins that exhibit activity on a target sequence that does not comprise the canonical PAM (5′-NGG-3′, where N is A, C, G, or T) at its 3′-end. In some embodiments, the Cas9 protein exhibits activity on a target sequence comprising a 5′-NGG-3′ PAM sequence at its 3′-end. In some embodiments, the Cas9 protein exhibits activity on a target sequence comprising a 5′-NNG-3′ PAM sequence at its 3′-end. In some embodiments, the Cas9 protein exhibits activity on a target sequence comprising a 5′-NNA-3′ PAM sequence at its 3′-end. In some embodiments, the Cas9 protein exhibits activity on a target sequence comprising a 5′-NNC-3′ PAM sequence at its 3′-end. In some embodiments, the Cas9 protein exhibits activity on a target sequence comprising a 5′-NNT-3′ PAM sequence at its 3′-end. In some embodiments, the Cas9 protein exhibits activity on a target sequence comprising a 5′-NGT-3′ PAM sequence at its 3′-end. In some embodiments, the Cas9 protein exhibits activity on a target sequence comprising a 5′-NGA-3′ PAM sequence at its 3′-end. In some embodiments, the Cas9 protein exhibits activity on a target sequence comprising a 5′-NGC-3′ PAM sequence at its 3′-end. In some embodiments, the Cas9 protein exhibits activity on a target sequence comprising a 5′-NAA-3′ PAM sequence at its 3′-end. In some embodiments, the Cas9 protein exhibits activity on a target sequence comprising a 5′-NAC-3′ PAM sequence at its 3′-end. In some embodiments, the Cas9 protein exhibits activity on a target sequence comprising a 5′ NAT-3′ PAM sequence at its 3′-end. In still other embodiments, the Cas9 protein exhibits activity on a target sequence comprising a 5′-NAG-3′ PAM sequence at its 3′-end.

[0253] In some embodiments, the disclosed base editors comprise a napDNAbp domain comprising a SpCas9-NG, which has a PAM that corresponds to NGN. In some embodiments, the disclosed base editors comprise a napDNAbp domain comprising a SpCas9-KKH, which has a PAM that corresponds to NNNRRT.

[0254] It should be appreciated that any of the amino acid mutations described herein, (e.g., A262T) from a first amino acid residue (e.g., A) to a second amino acid residue (e.g., T) may also include mutations from the first amino acid residue to an amino acid residue that is similar to (e.g., conserved) the second amino acid residue. For example, mutation of an amino acid with a hydrophobic side chain (e.g., alanine, valine, isoleucine, leucine, methionine, phenylalanine, tyrosine, or tryptophan) may be a mutation to a second amino acid with a different hydrophobic side chain (e.g., alanine, valine, isoleucine, leucine, methionine, phenylalanine, tyrosine, or tryptophan). For example, a mutation of an alanine to a threonine (e.g., a A262T mutation) may also be a mutation from an alanine to an amino acid that is similar in size and chemical properties to a threonine, for example, serine. As another example, mutation of an amino acid with a positively charged side chain (e.g., arginine, histidine, or lysine) may be a mutation to a second amino acid with a different positively charged side chain (e.g., arginine, histidine, or lysine). As another example, mutation of an amino acid with a polar side chain (e.g., serine, threonine, asparagine, or glutamine) may be a mutation to a second amino acid with a different polar side chain (e.g., serine, threonine, asparagine, or glutamine). Additional similar amino acid pairs include, but are not limited to, the following: phenylalanine and tyrosine; asparagine and glutamine; methionine and cysteine; aspartic acid and glutamic acid; and arginine and lysine. The skilled artisan would recognize that such conservative amino acid substitutions will likely have minor effects on protein structure and are likely to be well tolerated without compromising function. In some embodiments, any amino of the amino acid mutations provided herein from one amino acid to a threonine may be an amino acid mutation to a serine. In some embodiments, any amino of the amino acid mutations provided herein from one amino acid to an arginine may be an amino acid mutation to a lysine. In some embodiments, any amino of the amino acid mutations provided herein from one amino acid to an isoleucine, may be an amino acid mutation to an alanine, valine, methionine, or leucine. In some embodiments, any amino of the amino acid mutations provided herein from one amino acid to a lysine may be an amino acid mutation to an arginine. In some embodiments, any amino of the amino acid mutations provided herein from one amino acid to an aspartic acid may be an amino acid mutation to a glutamic acid or asparagine. In some embodiments, any amino of the amino acid mutations provided herein from one amino acid to a valine may be an amino acid mutation to an alanine, isoleucine, methionine, or leucine. In some embodiments, any amino of the amino acid mutations provided herein from one amino acid to a glycine may be an amino acid mutation to an alanine. It should be appreciated, however, that additional conserved amino acid residues would be recognized by the skilled artisan and any of the amino acid mutations to other conserved amino acid residues are also within the scope of this disclosure.

[0255] In some embodiments, the present disclosure may utilize any of the Cas9 variants disclosed in the SEQUENCES section below.

[0256] In some embodiments, the Cas9 protein comprises a combination of mutations that exhibit activity on a target sequence comprising a 5′-NAA-3′ PAM sequence at its 3′-end. In some embodiments, the combination of mutations is present in any one of the clones listed in Table 1. In some embodiments, the combination of mutations is conservative mutations of the clones listed in Table 1. In some embodiments, the Cas9 protein comprises the combination of mutations of any one of the Cas9 clones listed in Table 1.

TABLE 1
NAA PAM Clones
Mutations from wild-type SpCas9 (e.g., SEQ ID NO: 213)

D177N, K218R, D614N, D1135N, P1137S, E1219V, A1320V, A1323D, R1333K
D177N, K218R, D614N, D1135N, E1219V, Q1221H, H1264Y, A1320V, R1333K
A10T, 1322V, S409I, E427G, G715C, D1135N, E1219V, Q1221H, H1264Y, A1320V, R1333K
A367T, K710E, R1114G, D1135N, P1137S, E1219V, Q1221H, H1264Y, A1320V, R1333K
A10T, 1322V, S409I, E427G, R753G, D861N, D1135N, K1188R, E1219V, Q1221H, H1264H,
A1320V, R1333K
A10T, 1322V, S409I, E427G, R654L, V743I, R753G, M1021T, D1135N, D1180G, K1211R,
E1219V, Q1221H, H1264Y, A1320V, R1333K
A10T, 1322V, S409I, E427G, V743I, R753G, E762G, D1135N, D1180G, K1211R, E1219V,
Q1221H, H1264Y, A1320V, R1333K
A10T, 1322V, S409I, E427G, R753G, D1135N, D1180G, K1211R, E1219V, Q1221H, H1264Y,
S1274R, A1320V, R1333K
A10T, 1322V, S409I, E427G, A589S, R753G, D1135N, E1219V, Q1221H
R1333K TL, 60 TL, 65
A10T, 1322V, S409I, E427G, R753G, E757K, G865G, D1135N, E1219V, Q1221H, H1264Y,
A1320V, R1333K
A10T, 1322V, S409I, E427G, R654L, R753G, E757K, D1135N, E1219V, Q1221H, H1264Y,
A1320V, R1333K
A10T, 1322V, S409I, E427G, K599R, M631A, R654L, K673E, V743I, R753G, N758H,
D1135N, D1180G, E1219V, Q1221H, Q1256R, H1264Y, A1320V, A1323D, R1333K TL, 60
A10T, 1322V, S409I, E427G, R654L, K673E, V743I, R753G, E762G, N869S, N1054D R1114G,
D1135N, D1180G, E1219V, Q1221H, H1264Y, A1320V, A1323D, R1333K
A10T, 1322V, S409I, E427G, R654L, L727I, V743I, R753G, E762G, R859S, N946D, F1134L,
D1135N, D1180G, E1219V, Q1221H, H1264Y, N1317T, A1320V, A1323D, R1333K
A10T, 1322V, S409I, E427G, R654L, K673E, V743I, R753G, E762G, N803S, N869S, Y1016D,
G1077D, R1114G, F1134L, D1 135N, D1180G, E1219V, Q1221H, H1264Y, V1290G, L1318S,
A1320V, A1323D, R1333K
A10T, 1322V, S409I, E427G, R654L, K673E, V743I, R753G, E762G, N803S, N869S, Y1016D,
G1077D, R1114G, F1134L, D1 135N, K1151E, D1180G, E1219V, Q1221H, H1264Y, V1290G,
L1318S, A1320V, R1333K
A10T, 1322V, S409I, E427G, R654L, K673E, V743I, R753G, E762G, N803S, N869S, Y1016D,
G1077D, R1114G, F1134L, D1 135N, D1180G, E1219V, Q1221H, H1264Y, V1290G, L1318S,
A1320V, A1323D, R1333K
A10T, 1322V, S409I, E427G, R654L, K673E, F693L, V743I, R753G, E762G, N803S, N869S,
L921P, Y1016D, G1077D, F1080S, R1114G, D1135N, D1180G, E1219V, Q1221H, H1264Y,
L1318S, A1320V, A1323D, R1333K
A10T, 1322V, S409I, E427G, E630K, R654L, K673E, V743I, R753G, E762G, Q768H, N803S,
N869S, Y1016D, G1077D, R1114G, F1134L, D1135N, D1180G, E1219V, Q1221H, H1264Y,
L1318S, A1320V, R1333K
A10T, 1322V, S409I, E427G, R654L, K673E, F693L, V743I, R753G, E762G, Q768H, N803S,
N869S, Y1016D, G1077D, R1114G, F1134L, D1135N, D1180G, E1219V, Q1221H, G1223S,
H1264Y, L1318S, A1320V, R1333K
A10T, 1322V, S409I, E427G, R654L, K673E, F693L, V743I, R753G, E762G, N803S, N869S,
L921P, Y1016D, G1077D, F1801S, R1114G, D1135N, D1180G, E1219V, Q1221H, H1264Y,
L1318S, A1320V, A1323D, R1333K
A10T, 1322V, S409I, E427G, R654L, V743I, R753G, M1021T D1135N, D1180G, K1211R,
E1219V, Q1221H, H1264Y, A1320V, R1333K
A10T, 1322V, S409I, E427G, R654L, K673E, V743I, R753G, E762G, M673I, N803S, N869S,
G1077D, R1114G, D1135N, V1139A, D1180G, E1219V, Q1221H A1320V, R1333K
A10T, 1322V, S409I, E427G, R654L, K673E, V743I, R753G, E762G, N803S, N869S, R1114G,
D1135N, E1219V, Q1221H, A1320V, R1333KTZ, 1/70

[0257] In some embodiments, the Cas9 protein comprises an amino acid sequence that is at least 80% identical to the amino acid sequence of a Cas9 protein as provided by any one of the variants of Table 1. In some embodiments, the Cas9 protein comprises an amino acid sequence that is at least 85%, at least 90%, at least 92%, at least 95%, at least 96%, at least 97%, at least 98%, at least 99%, or at least 99.5% identical to the amino acid sequence of a Cas9 protein as provided by any one of the variants of Table 1.

[0258] In some embodiments, the Cas9 protein exhibits an increased activity on a target sequence that does not comprise the canonical PAM (5′-NGG-3′) at its 3′ end as compared to Streptococcus pyogenes Cas9 as provided by SEQ ID NO: 213. In some embodiments, the Cas9 protein exhibits an activity on a target sequence having a 3′ end that is not directly adjacent to the canonical PAM sequence (5′-NGG-3′) that is at least 5-fold increased as compared to the activity of Streptococcus pyogenes Cas9 as provided by SEQ ID NO: 213 on the same target sequence. In some embodiments, the Cas9 protein exhibits an activity on a target sequence that is not directly adjacent to the canonical PAM sequence (5′-NGG-3′) that is at least 10-fold, at least 50-fold, at least 100-fold, at least 500-fold, at least 1,000-fold, at least 5,000-fold, at least 10,000-fold, at least 50,000-fold, at least 100,000-fold, at least 500,000-fold, or at least 1,000,000-fold increased as compared to the activity of Streptococcus pyogenes as provided by SEQ ID NO: 213 on the same target sequence. In some embodiments, the 3′ end of the target sequence is directly adjacent to an AAA, GAA, CAA, or TAA sequence. In some embodiments, the Cas9 protein comprises a combination of mutations that exhibit activity on a target sequence comprising a 5′-NAC-3′ PAM sequence at its 3′-end. In some embodiments, the combination of mutations is present in any one of the clones listed in Table 2. In some embodiments, the combination of mutations is conservative mutations of the clones listed in Table 2. In some embodiments, the Cas9 protein comprises the combination of mutations of any one of the Cas9 clones listed in Table 2.

TABLE 2
NAC PAM Clones
MUTATIONS FROM WILD-TYPE SPCAS9 (E.G., SEQ ID NO: 213)

T472I, R753G, K890E, D1332N, R1335Q, T1337N
I1057S, D1135N, P1301S, R1335Q, T1337N
T472I, R753G, D1332N, R1335Q, T1337N
D1135N, E1219V, D1332N, R1335Q, T1337N
T472I, R753G, K890E, D1332N, R1335Q, T1337N
I1057S, D1135N, P1301S, R1335Q, T1337N
T472I, R753G, D1332N, R1335Q, T1337N
T472I, R753G, Q771H, D1332N, R1335Q, T1337N
E627K, T638P, K652T, R753G, N803S, K959N, R1114G, D1135N, E1219V, D1332N, R1335Q,
T1337N
E627K, T638P, K652T, R753G, N803S, K959N, R1114G, D1135N, K1156E, E1219V, D1332N,
R1335Q, T1337N
E627K, T638P, V647I, R753G, N803S, K959N, G1030R, I1055E, R1114G, D1135N, E1219V,
D1332N, R1335Q, T1337N
E627K, E630G, T638P, V647A, G687R, N767D, N803S, K959N,
D1332G, R1335Q, T1337N
E627K, T638P, R753G, N803S, K959N, R1114G D1135N, E1219V, N1266H, D1332N, R1335Q,
T1337N
E627K, T638P, R753G, N803S, K959N, I1057T R1114G, D1135N, E1219V, D1332N, R1335Q,
T1337N
E627K, T638P, R753G, N803S, K959N, R1114G D1135N, E1219V, D1332N, R1335Q, T1337N
E627K, M631I, T638P, R753G, N803S, K959N, Y1036H, R1114G, D1135N, E1219V, D1251G,
D1332G, R1335Q, T1337N
E627K, T638P, R753G, N803S, V875I, K959N, Y1016C, R1114G, D1135N, E1219V, D1251G,
D1332G, R1335Q, T1337N, 11348V
K608R, E627K, T638P, V647I, R654L, R753G, N803S, T804A,
D1135N, E1219V, D1332N, R1335Q, TI 337N
K608R, E627K, T638P, V647I, R753G, N803S, V922A, K959N,
D1135N, K1156N, E1219V, N1252D, D1332N, R1335Q, T1337N
K608R, E627K, R629G, T638P, V647I, A711T, R753G, K775R, K789E, N803S, K959N, V1015A,
Y1036H, R1114G, D1135N, E1219V, N1286H, D1332N, R1335Q, T1337N
K608R, E627K, T638P, V647I, T740A, R753G, N803S, K948E, K959N, Y1016S, R1114G,
D1135N, E1219V, N1286H, D1332N, R1335Q, T1337N
K608R, E627K, T638P, V647I, T740A, N803S, K948E, K959N,
E1219V, N1286H, D1332N, R1335Q, T1337N
I670S, K608R, E627K, E630G, T638P, V647I, R653K, R753G, I795L, K797N, N803S, K866R,
K890N, K959N, Y1016C, R1114G, D1135N, E1219V, D1 332N, R1335Q, T1337N
K608R, E627K, T638P, V647I, T740A, G752R, R753G, K797N,
Y1016S, R1114G, D1135N, E1219V, N1266H, D1332N, R1335Q, T1337N
I570T, A589V, K608R, E627K, T638P, V647I, R654L, Q716R, R753G, N803S, K948E, K959N,
Y1016S, R1114G, D1135N, E1207G, E1219V, N1234D, D1332N, R1335Q T1337N
K608R, E627K, R629G, T638P, V647I, R654L, Q740R, R753G, N803S, K959N, N990S, T995S,
V1015A, Y1036D, R1114G, D1135N, E1207G, E1219V, N1234D, N1266H D1332N, R1335Q,
T1337N
I562F, V565D, I570T, K608R, L625S, E627K, T638P, V647I, R654I, G752R, R753G,
N808D, K959N, M1021L, R1114G, D1135N, N1177S, N1234D, 1332N, R1335Q, T1337N
I562F, I570T, K608R, E627K, T638P, V647I, R753G, E790A, N803S, K959N, V1015A, Y1036H,
R1114G, D1135N, D1180E, A1184T, E1219V, D1332N, R1335Q, T1337N
I570T, K608R, E627K, T638P, V647I, R654H, R753G, E790A, N803S, K959N, V1015A, R1114G,
D1127A, D1135N, E1219V, D1332N, R1335Q, T1337N
I570T, K608R, L625S, E627K, T638P, V647I, R654I, T703P, R753G, N803S, N808D, K959N,
M1021L, R1114G, D1135N, E1219V, D1332N, R1335Q, T1337N
I570S, K608R, E627K, E630G, T638P, V647I, R653K, R753G, I795L, N803S, K866R, K890N,
K959N, Y1016C, R1114G, D1135N, E1219V, D1332N, R1335Q, T1337N
I570T, K608R, E627K, T638P, V647I, R654H, R753G, E790A, N803S, K959N, V1016A, R1114G,
D1135N, E1219V, K1246E, D1332N, R1335Q, T1337N
K608R, E627K, T638P, V647I, R654L, K673E, R753G, E790A, N803S, K948E, K959N, R1114G,
D1127G, D1135N, D1180E, E1219V, N1286H, D1332N, R1335Q, T1337N
K608R, L625S, E627K, T638P, V647I, R654I, I670T, R753G, N803S, N808D, K959N, M1021L,
R1114G, D1135N, E1219V, N1286H, D1332N, R1335Q, T1337N
E627K, M631V, T638P, V647I, K710E, R753G, N803S, N808D, K948E, M1021L R1114G,
D1135N, E1219V, D1332N, R1335Q, T1337N, S1338T, H1349R

[0259] In some embodiments, the Cas9 protein comprises an amino acid sequence that is at least 80% identical to the amino acid sequence of a Cas9 protein as provided by any one of the variants of Table 2. In some embodiments, the Cas9 protein comprises an amino acid sequence that is at least 85%, at least 90%, at least 92%, at least 95%, at least 96%, at least 97%, at least 98%, at least 99%, or at least 99.5% identical to the amino acid sequence of a Cas9 protein as provided by any one of the variants of Table 2.

[0260] In some embodiments, the Cas9 protein comprises a combination of mutations that exhibit activity on a target sequence comprising a 5′-NAT-3′ PAM sequence at its 3′-end. In some embodiments, the combination of mutations is present in any one of the clones listed in Table 3. In some embodiments, the combination of mutations is conservative mutations of the clones listed in Table 3. In some embodiments, the Cas9 protein comprises the combination of mutations of any one of the Cas9 clones listed in Table 3.

TABLE 3
NAT PAM Clones
MUTATIONS FROM WILD-TYPE SPCAS9 (E.G., SEQ ID NO: 213)

K961E, H985Y, D1135N, K1191N, E1219V, Q1221H, A1320A, P1321S, R1335L
D1135N, G1218S, E1219V, Q1221H, P1249S, P1321S, D1322G, R1335L
V743I, R753G, E790A, D1135N, G1218S, E1219V, Q1221H, A1227V, P1249S, N1286K, A1293T,
P1321S, D1322G, R1335L, T1339I
F575S, M631L, R654L, V748I, V743I, R753G, D853E, V922A, R1114G D1135N, G1218S,
E1219V, Q1221H, A1227V, P1249S, N1286K, A1293T, P1321S, D1322G, R1335L, T1339I
F575S, M631L, R654L, R664K, R753G, D853E, V922A, R1114G D1135N, D1180G, G1218S,
E1219V, Q1221H, P1249S, N1286K, P1321S, D1322G, R1335L
M631L, R654L, R753G, K797E, D853E, V922A, D1012A, R1114G D1135N, G1218S, E1219V,
Q1221H, P1249S, N1317K, P1321S, D1322G, R1335L
F575S, M631L, R654L, R664K, R753G, D853E, V922A, R1114G, Y1131C, D1135N, D1180G,
G1218S, E1219V, Q1221H, P1249S, P1321S, D1322G, R1335L
F575S, M631L, R654L, R664K, R753G, D853E, V922A, R1114G, Y1131C, D1135N, D1180G,
G1218S, E1219V, Q1221H, P1249S, P1321S, D1322G, R1335L
F575S, D596Y, M631L, R654L, R664K, R753G, D853E, V922A, R1114G, Y1131C, D1135N,
D1180G, G1218S, E1219V, Q1221H, P1249S, Q1256R, P1321S, D1322G, R1335L
F575S, M631L, R654L, R664K, K710E, V750A, R753G, D853E, V922A, R1114G, Y1131C,
D1135N, D1180G, G1218S, E1219V, Q1221H, P1249S, P1321S, D1322G, R1335L
F575S, M631L, K649R, R654L, R664K, R753G, D853E, V922A, R1114G, Y1131C, D1135N,
K1156E, D1180G, G1218S, E1219V, Q1221H, P1249S, P1321S, D1322G, R1335L
F575S, M631L, R654L, R664K, R753G, D853E, V922A, R1114G, Y1131C, D1135N, D1180G,
G1218S, E1219V, Q1221H, P1249S, P1321S, D1322G, R1335L
F575S, M631L, R654L, R664K, R753G, D853E, V922A, I1057G, R1114G, Y1131C, D1135N,
D1180G, G1218S, E1219V, Q1221H, P1249S, N1308D, P1321S, D1322G, R1335L
M631L, R654L, R753G, D853E, V922A, R1114G, Y1131C, D1135N, E1150V, D118 OG, G1218S,
E1219V, Q1221H, P1249S, P1321S, D1332G, R1335L
M631L, R654L, R664K, R753G, D853E, 11057V, Y1131C, D1135N, D1180G, G121 8S, E1219V,
Q1221H, P1249S, P1321S, D1332G, R1335L
M631L, R654L, R664K, R753G, 11057V, R1114G, Y1131C, D1135N, D1180G, G12 18S, E1219V,
Q1221H, P1249S, P1321S, D1332G, R1335L

[0261] The above description of various napDNAbps which can be used in connection with the presently disclose base editors is not meant to be limiting in any way. The base editors may comprise the canonical SpCas9, or any ortholog Cas9 protein, or any variant Cas9 protein-including any naturally occurring variant, mutant, or otherwise engineered version of Cas9—that is known or which can be made or evolved through a directed evolutionary or otherwise mutagenic process. In various embodiments, the Cas9 or Cas9 variants have a nickase activity, i.e., only cleave of strand of the target DNA sequence. In other embodiments, the Cas9 or Cas9 variants have inactive nucleases, i.e., are “dead” Cas9 proteins. Other variant Cas9 proteins that may be used are those having a smaller molecular weight than the canonical SpCas9 (e.g., for easier delivery) or having modified or rearranged primary amino acid structure (e.g., the circular permutant formats). The base editors described herein may also comprise Cas9 equivalents, including Cas12a/Cpf1 and Cas12b proteins which are the result of convergent evolution. The napDNAbps used herein (e.g., SpCas9, Cas9 variant, or Cas9 equivalents) may also contain various modifications that alter/enhance their PAM specifities. Lastly, the application contemplates any Cas9, Cas9 variant, or Cas9 equivalent which has at least 70%, at least 75%, at least 80%, at least 85%, at least 90%, at least 91%, at least 92%, at least 93%, at least 94%, at least 95%, at least 96%, at least 97%, at least 98%, at least 99%, or at least 99.9% sequence identity to a reference Cas9 sequence, such as a references SpCas9 canonical sequences or a reference Cas9 equivalent (e.g., Cas12a/Cpf1).

[0262] In a particular embodiment, the Cas9 variant having expanded PAM capabilities is SpCas9 (H840A) VRQR, or SpCas9-VRQR. In some embodiments, the disclosed base editors comprise a napDNAbp domain that has a sequence that is at least 90%, at least 95%, at least 98%, or at least 99% identical to SpCas9-VRQR. In some embodiments, the disclosed base editors comprise a napDNAbp domain that comprises SpCas9-VRQR. The SpCas9-VRQR comprises the following amino acid sequence (with the V, R, Q, R substitutions relative to the SpCas9 (H840A) of SEQ ID NO: 222 show, in bold underline. In addition, the methionine residue in SpCas9 (H840) was removed for SpCas9 (H840A) VRQR):

(SEQ ID NO: 223)
DKKYSIGLDIGTNSVGWAVITDEYKVPSKKFKVLGNTDRHSIKKNLIGAL
LFDSGETAEATRLKRTARRRYTRRKNRICYLQEIFSNEMAKVDDSFFHRL
EESFLVEEDKKHERHPIFGNIVDEVAYHEKYPTIYHLRKKLVDSTDKADL
RLIYLALAHMIKFRGHFLIEGDLNPDNSDVDKLFIQLVQTYNQLFEENPI
NASGVDAKAILSARLSKSRRLENLIAQLPGEKKNGLFGNLIALSLGLTPN
FKSNFDLAEDAKLQLSKDTYDDDLDNLLAQIGDQYADLFLAAKNLSDAIL
LSDILRVNTEITKAPLSASMIKRYDEHHQDLTLLKALVRQQLPEKYKEIF
FDQSKNGYAGYIDGGASQEEFYKFIKPILEKMDGTEELLVKLNREDLLRK
QRTFDNGSIPHQIHLGELHAILRRQEDFYPFLKDNREKIEKILTFRIPYY
VGPLARGNSRFAWMTRKSEETITPWNFEEVVDKGASAQSFIERMTNFDKN
LPNEKVLPKHSLLYEYFTVYNELTKVKYVTEGMRKPAFLSGEQKKAIVDL
LFKTNRKVTVKQLKEDYFKKIECFDSVEISGVEDRFNASLGTYHDLLKII
KDKDFLDNEENEDILEDIVLTLTLFEDREMIEERLKTYAHLFDDKVMKQL
KRRRYTGWGRLSRKLINGIRDKQSGKTILDFLKSDGFANRNFMQLIHDDS
LTFKEDIQKAQVSGQGDSLHEHIANLAGSPAIKKGILQTVKVVDELVKVM
GRHKPENIVIEMARENQTTQKGQKNSRERMKRIEEGIKELGSQILKEHPV
ENTQLQNEKLYLYYLQNGRDMYVDQELDINRLSDYDVDAIVPQSFLKDDS
IDNKVLTRSDKNRGKSDNVPSEEVVKKMKNYWRQLLNAKLITQRKFDNLT
KAERGGLSELDKAGFIKRQLVETRQITKHVAQILDSRMNTKYDENDKLIR
EVKVITLKSKLVSDFRKDFQFYKVREINNYHHAHDAYLNAVVGTALIKKY
PKLESEFVYGDYKVYDVRKMIAKSEQEIGKATAKYFFYSNIMNFFKTEIT
LANGEIRKRPLIETNGETGEIVWDKGRDFATVRKVLSMPQVNIVKKTEVQ
TGGFSKESILPKRNSDKLIARKKDWDPKKYGGFVSPTVAYSVLVVAKVEK
GKSKKLKSVKELLGITIMERSSFEKNPIDFLEAKGYKEVKKDLIIKLPKY
SLFELENGRKRMLASARELQKGNELALPSKYVNFLYLASHYEKLKGSPED
NEQKQLFVEQHKHYLDEIIEQISEFSKRVILADANLDKVLSAYNKHRDKP
IREQAENIIHLFTLTNLGAPAAFKYFDTTIDRKQYRSTKEVLDATLIHQS
ITGLYETRIDLSQLGGD

[0263] In another particular embodiment, the Cas9 variant having expanded PAM capabilities is SpCas9 (H840A) VRER, having the following amino acid sequence (with the V, R, E, R substitutions relative to the SpCas9 (H840A) of SEQ ID NO: 222 are shown in bold underline. In addition, the methionine residue in SpCas9 (H840) was removed for SpCas9 (H840A) VRER):

(SEQ ID NO: 224)
DKKYSIGLDIGTNSVGWAVITDEYKVPSKKFKVLGNTDRHSIKKNLIGAL
LFDSGETAEATRLKRTARRRYTRRKNRICYLQEIFSNEMAKVDDSFFHRL
EESFLVEEDKKHERHPIFGNIVDEVAYHEKYPTIYHLRKKLVDSTDKADL
RLIYLALAHMIKFRGHFLIEGDLNPDNSDVDKLFIQLVQTYNQLFEENPI
NASGVDAKAILSARLSKSRRLENLIAQLPGEKKNGLFGNLIALSLGLTPN
FKSNFDLAEDAKLQLSKDTYDDDLDNLLAQIGDQYADLFLAAKNLSDAIL
LSDILRVNTEITKAPLSASMIKRYDEHHQDLTLLKALVRQQLPEKYKEIF
FDQSKNGYAGYIDGGASQEEFYKFIKPILEKMDGTEELLVKLNREDLLRK
QRTFDNGSIPHQIHLGELHAILRRQEDFYPFLKDNREKIEKILTFRIPYY
VGPLARGNSRFAWMTRKSEETITPWNFEEVVDKGASAQSFIERMTNFDKN
LPNEKVLPKHSLLYEYFTVYNELTKVKYVTEGMRKPAFLSGEQKKAIVDL
LFKTNRKVTVKQLKEDYFKKIECFDSVEISGVEDRFNASLGTYHDLLKII
KDKDFLDNEENEDILEDIVLTLTLFEDREMIEERLKTYAHLFDDKVMKQL
KRRRYTGWGRLSRKLINGIRDKQSGKTILDFLKSDGFANRNFMQLIHDDS
LTFKEDIQKAQVSGQGDSLHEHIANLAGSPAIKKGILQTVKVVDELVKVM
GRHKPENIVIEMARENQTTQKGQKNSRERMKRIEEGIKELGSQILKEHPV
ENTQLQNEKLYLYYLQNGRDMYVDQELDINRLSDYDVDAIVPQSFLKDDS
IDNKVLTRSDKNRGKSDNVPSEEVVKKMKNYWRQLLNAKLITQRKFDNLT
KAERGGLSELDKAGFIKRQLVETRQITKHVAQILDSRMNTKYDENDKLIR
EVKVITLKSKLVSDFRKDFQFYKVREINNYHHAHDAYLNAVVGTALIKKY
PKLESEFVYGDYKVYDVRKMIAKSEQEIGKATAKYFFYSNIMNFFKTEIT
LANGEIRKRPLIETNGETGEIVWDKGRDFATVRKVLSMPQVNIVKKTEVQ
TGGFSKESILPKRNSDKLIARKKDWDPKKYGGFVSPTVAYSVLVVAKVEK
GKSKKLKSVKELLGITIMERSSFEKNPIDFLEAKGYKEVKKDLIIKLPKY
SLFELENGRKRMLASARELQKGNELALPSKYVNFLYLASHYEKLKGSPED
NEQKQLFVEQHKHYLDEIIEQISEFSKRVILADANLDKVLSAYNKHRDKP
IREQAENIIHLFTLTNLGAPAAFKYFDTTIDRKEYRSTKEVLDATLIHQS
ITGLYETRIDLSQLGGD

[0264] In addition, any available methods may be utilized to obtain or construct a variant or mutant Cas9 protein. The term “mutation,” as used herein, refers to a substitution of a residue within a sequence, e.g., a nucleic acid or amino acid sequence, with another residue, or a deletion or insertion of one or more residues within a sequence. Mutations are typically described herein by identifying the original residue followed by the position of the residue within the sequence and by the identity of the newly substituted residue. Various methods for making the amino acid substitutions (mutations) provided herein are well known in the art, and are provided by, for example, Green and Sambrook, Molecular Cloning: A Laboratory Manual (4th ed., Cold Spring Harbor Laboratory Press, Cold Spring Harbor, N.Y. (2012)). Mutations can include a variety of categories, such as single base polymorphisms, microduplication regions, indel, and inversions, and is not meant to be limiting in any way. Mutations can include “loss-of-function” mutations which is the normal result of a mutation that reduces or abolishes a protein activity. Most loss-of-function mutations are recessive, because in a heterozygote the second chromosome copy carries an unmutated version of the gene coding for a fully functional protein whose presence compensates for the effect of the mutation. Mutations also embrace “gain-of-function” mutations, which is one which confers an abnormal activity on a protein or cell that is otherwise not present in a normal condition. Many gain-of-function mutations are in regulatory sequences rather than in coding regions, and can therefore have a number of consequences. For example, a mutation might lead to one or more genes being expressed in the wrong tissues, these tissues gaining functions that they normally lack. Because of their nature, gain-of-function mutations are usually dominant.

Evolved napDNAbp Domains

[0265] This disclosure provides napDNAbp domains that may comprise Cas9 variants that have been evolved by continuous or non-continuous evolution and recognize an expanded PAM, as recently reported in Hu et al., Nature, 556(7699):57-63 (2018) and International Publication No. WO 2020/041751, published Feb. 27, 2020, each of which is incorporated by reference herein. Exemplary evolved Cas9 variants having expanded PAM specificities include xCas9(3.6) and xCas9(3.7).

[0266] Phage-assisted continuous evolution (PACE) was used to evolve the wild type SpCas9 to recognize a broad range of PAM sequences, including HAA (e.g., GAA), NAA, NAG, HAT (e.g., GAT), and HAC PAM sequences. The PAM compatibility of xCas9 is the broadest reported to date among Cas9s active in mammalian cells, and supports applications in human cells including targeted transcriptional activation, nuclease-mediated gene disruption, and both cytosine and adenine base editing.

[0267] Accordingly, in some embodiments, the base editors comprise a napDNAbp domain that comprises an amino acid sequence that is at least 85%, at least 90%, at least 91%, at least 92%, at least 93%, at least 94%, at least 95%, at least 96%, at least 97%, at least 98%, at least 99%, or at least 99.5% identical to the xCas9 set forth in one of SEQ ID NOs: 236 or 237, provided below. Residues that have been mutated to wild-type SpCas9 (SEQ ID NO: 213) are underlined and bolded.

(xCas9(3.7), SEQ ID NO: 236)
MDKKYSIGLDIGTNSVGWAVITDEYKVPSKKFKVLGNTDRHSIKKNLIGALLFDSGETAEAT
RLKRTARRRYTRRKNRICYLQEIFSNEMAKVDDSFFHRLEESFLVEEDKKHERHPIFGNIVDE
VAYHEKYPTIYHLRKKLVDSTDKADLRLIYLALAHMIKFRGHFLIEGDLNPDNSDVDKLFIQ
LVQTYNQLFEENPINASGVDAKAILSARLSKSRRLENLIAQLPGEKKNGLFGNLIALSLGLTP
NFKSNFDLAEDTKLQLSKDTYDDDLDNLLAQIGDQYADLFLAAKNLSDAILLSDILRVNTEI
TKAPLSASMIKLYDEHHQDLTLLKALVRQQLPEKYKEIFFDQSKNGYAGYIDGGASQEEFY
KFIKPILEKMDGTEELLVKLNREDLLRKQRTFDNGIIPHQIHLGELHAILRRQEDFYPFLKDN
REKIEKILTFRIPYYVGPLARGNSRFAWMTRKSEETITPWNFEKVVDKGASAQSFIERMTNFD
KNLPNEKVLPKHSLLYEYFTVYNELTKVKYVTEGMRKPAFLSGDQKKAIVDLLFKTNRKVT
VKQLKEDYFKKIECFDSVEISGVEDRFNASLGTYHDLLKIIKDKDFLDNEENEDILEDIVLTLT
LFEDREMIEERLKTYAHLFDDKVMKQLKRRRYTGWGRLSRKLINGIRDKQSGKTILDFLKS
DGFANRNFIQLIHDDSLTFKEDIQKAQVSGQGDSLHEHIANLAGSPAIKKGILQTVKVVDELV
KVMGRHKPENIVIEMARENQTTQKGQKNSRERMKRIEEGIKELGSQILKEHPVENTQLQNE
KLYLYYLQNGRDMYVDQELDINRLSDYDVDHIVPQSFLKDDSIDNKVLTRSDKNRGKSDNV
PSEEVVKKMKNYWRQLLNAKLITQRKFDNLTKAERGGLSELDKAGFIKRQLVETRQITKHV
AQILDSRMNTKYDENDKLIREVKVITLKSKLVSDFRKDFQFYKVREINNYHHAHDAYLNAV
VGTALIKKYPKLESEFVYGDYKVYDVRKMIAKSEQEIGKATAKYFFYSNIMNFFKTEITLAN
GEIRKRPLIETNGETGEIVWDKGRDFATVRKVLSMPQVNIVKKTEVQTGGFSKESILPKRNS
DKLIARKKDWDPKKYGGFDSPTVAYSVLVVAKVEKGKSKKLKSVKELLGITIMERSSFEKN
PIDFLEAKGYKEVKKDLIIKLPKYSLFELENGRKRMLASAGVLQKGNELALPSKYVNFLYLA
SHYEKLKGSPEDNEQKQLFVEQHKHYLDEIIEQISEFSKRVILADANLDKVLSAYNKHRDKPI
REQAENIIHLFTLTNLGAPAAFKYFDTTIDRKRYTSTKEVLDATLIHQSITGLYETRIDLSQLG
GD
(xCas9(3.6), SEQ ID NO: 237)
MDKKYSIGLAIGTNSVGWAVITDEYKVPSKKFKVLGNTDRHSIKKNLIGALLFDSGETAEAT
RLKRTARRRYTRRKNRICYLQEIFSNEMAKVDDSFFHRLEESFLVGEDKKHERHPIFGNIVDE
VAYHEKYPTIYHLRKKLVDSTDKADLRLIYLALAHMIKFRGHFLIEGDLNPDNSDVDKLFIQ
LVQTYNQLFEENPINASGVDAKAILSARLAKSRRLENLIAQLPGEKKNGLFGNLIALSLGLTP
NFKSNFDLAEDTKLQLSKDTYDDDLDNLLAQIGDQYADLFLAAKNLSDAILLSDILRVNTEI
TKAPLSASMIKRYDEHHQDLTLLKALVRQQLPEKYKEIFFDQSKNGYAGYIDGGASQEEFYK
FIKPILEKMDGTEELLVKLNREDLLRKQRTFDNGIIPHQIHLGELHAILRRQEDFYPFLKDNRE
KIEKILTFRIPYYVGPLARGNSRFAWMTRKSEETITPWNFEKVVDKGASAQSFIERMTNFDK
NLPNEKVLPKHSLLYEYFTVYNELTKVKYVTEGMRKPAFLSGDQKKAIVDLLFKTNRKVTV
KQLKEDYFKKIECFDSVEISGVEDRFNASLGTYHDLLKIIKDKDFLDNEENEDILEDIVLTLTL
FEDREMIEERLKTYAHLFDDKVMKQLKRRRYTGWGRLSRKLINGIRDKQSGKTILDFLKSD
GFANRNFIQLIHDDSLTFKEDIQKAQVSGQGDSLHEHIANLAGSPAIKKGILQTVKVVDELVK
VMGRHKPENIVIEMARENQTTQKGQKNSRERMKRIEEGIKELGSQILKEHPVENTQLQNEK
LYLYYLQNGRDMYVDQELDINRLSDYDVDHIVPQSFLKDDSIDNKVLTRSDKNRGKSDNVP
SEEVVKKMKNYWRQLLNAKLITQRKFDNLTKAERGGLSELDKAGFIKRQLVETRQITKHVA
QILDSRMNTKYDENDKLIREVKVITLKSKLVSDFRKDFQFYKVREINNYHHAHDAYLNAVV
GTALIKKYPKLESEFVYGDYKVYDVRKMIAKSEQEIGKATAKYFFYSNIMNFFKTEITLANG
EIRKRPLIETNGETGEIVWDKGRDFATVRKVLSMPQVNIVKKTEVQTGGFSKESILPKRNSD
KLIARKKDWDPKKYGGFDSPTVAYSVLVVAKVEKGKSKKLKSVKELLGITIMERSSFEKNPI
DFLEAKGYKEVKKDLIIKLPKYSLFELENGRKRMLASAGVLQKGNELALPSKYVNFLYLAS
HYEKLKGSPEDNEQKQLFVEQHKHYLDEIIEQISEFSKRVILADANLDKVLSAYNKHRDKPI
REQAENIIHLFTLTNLGAPAAFKYFDTTIDRKRYTSTKEVLDATLIHQSITGLYETRIDISQLGG
D

[0268] Exemplary evolved Cas9 variants, such as xCas9(3.6) and xCas9(3.7), may be mutated into a nuclease-inactive Cas9 variant (or dxCas9) by introducing both of the D10A and H840A substitutions as described above. Exemplary evolved Cas9 variants may be mutated into a Cas9 nickase variant (or xCas9n) by introducing either of the D10A and H840A substitutions as described above. Thus, in some embodiments, the disclosed base editors comprise a napDNAbp domain that comprises a dxCas9 or an xCas9n.

[0269] Any available methods may be utilized to obtain an evolved variant or mutant Cas9 protein. Mutations can be introduced into a reference Cas9 protein using site-directed mutagenesis. Older methods of site-directed mutagenesis known in the art rely on sub-cloning of the sequence to be mutated into a vector, such as an M13 bacteriophage vector, that allows the isolation of a single-stranded DNA template. In these methods, one anneals a mutagenic primer (i.e., a primer capable of annealing to the site to be mutated but bearing one or more mismatched nucleotides at the site to be mutated) to the single-stranded template and then polymerizes the complement of the template starting from the 3′ end of the mutagenic primer. The resulting duplexes are then transformed into host bacteria and plaques are screened for the desired mutation. More recently, site-directed mutagenesis has employed PCR methodologies, which have the advantage of not requiring a single-stranded template. In addition, methods have been developed that do not require sub-cloning. Several issues must be considered when PCR-based site-directed mutagenesis is performed. First, in these methods it is desirable to reduce the number of PCR cycles to prevent expansion of undesired mutations introduced by the polymerase. Second, a selection must be employed in order to reduce the number of non-mutated parental molecules persisting in the reaction. Third, an extended-length PCR method is preferred in order to allow the use of a single PCR primer set. And fourth, because of the non-template-dependent terminal extension activity of some thermostable polymerases it is often necessary to incorporate an end-polishing step into the procedure prior to blunt-end ligation of the PCR-generated mutant product.

[0270] Mutations may also be introduced by directed evolution processes, such as phage-assisted continuous evolution (PACE) or phage-assisted noncontinuous evolution (PANCE). The term “phage-assisted continuous evolution (PACE),” as used herein, refers to continuous evolution that employs phage as viral vectors. The general concept of PACE technology has been described, for example, in International Application No. PCT/US2009/056194, filed Sep. 8, 2009, published as WO 2010/028347 on Mar. 11, 2010; International Application No. PCT/US2011/066747, filed Dec. 22, 2011, published as WO 2012/088381 on Jun. 28, 2012; U.S. Application, U.S. Pat. No. 9,023,594, issued May 5, 2015, International Application No. PCT/US2015/012022, filed Jan. 20, 2015, published as WO 2015/134121 on Sep. 11, 2015, U.S. Pat. No. 10,179,911, issued Jan. 15, 2019; International PCT Application, PCT/US2016/027795, filed Apr. 15, 2016, published as WO 2016/168631 on Oct. 20, 2016, and International Patent Publication WO 2019/023680, published Jan. 31, 2019, the entire contents of each of which are incorporated herein by reference. Variant Cas9s may also be generated by phage-assisted non-continuous evolution (PANCE), which as used herein, refers to non-continuous evolution that employs phage as viral vectors. PANCE is a simplified technique for rapid in vivo directed evolution using serial flask transfers of evolving ‘selection phage’ (SP), which contain a gene of interest to be evolved, across fresh E. coli host cells, thereby allowing genes inside the host E. coli to be held constant while genes contained in the SP continuously evolve. Serial flask transfers have long served as a widely-accessible approach for laboratory evolution of microbes, and, more recently, analogous approaches have been developed for bacteriophage evolution. The PANCE system features lower stringency than the PACE system.

[0271] Any of the napDNAbp domains disclosed herein may be provided as an isolated napDNAbp protein, e.g., for use in the assays and systems for determining off-target effects disclosed herein. In some embodiments, isolated Cas9 proteins are provided. In some embodiments, isolated dCas9 proteins are provided. In other embodiments, isolated nCas9 proteins are provided. In other embodiments, isolated CP1028, SpCas9-NG, and/or xCas9 proteins are provided. These isolated proteins may be associated with a gRNA engineered to bind the protein.

[0272] The isolated napDNAbp proteins provided herein may be from any bacterial species. In some embodiments, the isolated napDNAbp proteins are derived from S. pyogenes and/or S. aureus.

[0273] Any of the references noted above which relate to napDNAbp domains are hereby incorporated by reference in their entireties, if not already stated so.

### Cytidine Deaminases

[0274] In various embodiments, the novel base editors provided herein comprise a nucleobase modification domain that comprises a cytidine deaminase domain. In some embodiments, the cytidine deaminase domain is capable of catalyzing a C to U base conversion through a deamination reaction. The U is ultimately converted to a T by the cell's replication and mismatch repair systems.

[0275] In some embodiments, the cytidine deaminase is an apolipoprotein B mRNA-editing complex (APOBEC) deaminase. In some embodiments, the cytidine deaminase is an APOBEC1 deaminase, an APOBEC2 deaminase, an APOBEC3A deaminase, an APOBEC3B deaminase, an APOBEC3C deaminase, an APOBEC3D deaminase, an APOBEC3F deaminase, an APOBEC3G deaminase, an APOBEC3H deaminase, or an APOBEC4 deaminase, or a variant thereof. In some embodiments, the deaminase is an activation-induced deaminase (AID), e.g., a human AID. In some embodiments, the deaminase is a Lamprey CDA1, e.g., a Petromyzon marinus cytidine deaminase 1 (pmCDA1).

[0276] In some embodiments, the deaminase is from a human, chimpanzee, gorilla, monkey, cow, dog, rat, or mouse. In some embodiments, the deaminase is from a human. In some embodiments the deaminase is from a rat.

[0277] In some embodiments, the deaminase is a rat APOBEC1 deaminase comprising the amino acid sequence set forth in (SEQ ID NO: 238), or a variant thereof. In some embodiments, the deaminase is a human APOBEC1 deaminase comprising the amino acid sequence set forth in (SEQ ID NO: 239), or a variant thereof. In some embodiments, the deaminase is pmCDA1 (CDA) (SEQ ID NO: 244, or a variant thereof. Variants of rat APOBEC1 and CD1 that were evolved by PACE (evoAPOBEC1 and evoCDA1, respectively) were disclosed in Thuronyi et al., Nat. Biotechnol. (September 2019), 37(9):1070-1079 and International Publication No. WO 2019/023680, each of which is herein incorporated by reference. In some embodiments, the deaminase is evoCDA (SEQ ID NO: 246) or evoAPOBEC1 (SEQ ID NO: 247).

[0278] In some embodiments, the deaminase is human APOBEC3G (A3G) (SEQ ID NO: 242), or an evolved variant thereof. In some embodiments, the deaminase is a human APOBEC3B (SEQ ID NO: 241), or an evolved variant thereof. In some embodiments, the deaminase is a human APOBEC3A, or A3A (SEQ ID NO: 240), or an evolved variant thereof. In some embodiments, the deaminase is an AID (SEQ ID NO: 243), or an evolved variant thereof. In some embodiments, the deaminase is an evolved APOBEC3A (eA3A) (SEQ ID NO: 245), such as an APOBEC3A engineered to have a strict 5′ T sequence context requirement, as provided in M. Gehrke et al., APOBEC3A (eA3A). In some embodiments, the deaminase is at least 80%, at least 85%, at least 90%, at least 92%, at least 95%, at least 96%, at least 97%, at least 98%, at least 99%, or at least 99.5% identical to any one of the amino acid sequences set forth in SEQ ID NOs: 238-247.

[0279] In still other embodiments, the deaminase is a variant of rat APOBEC1. In particular embodiments, the deaminase is selected from YE1, YEE, YE2, EE, R33A, R33A+K34A, or AALN, or a variant thereof. The deaminase may comprise any of the variants of rat APOBEC1 reported in J. Grunewald et al., Nature 569, 433-437 (2019) and J. M. Gehrke et al., Nat. Biotechnol. 36, 977-982 (2018), each of which is incorporated herein by reference. In particular embodiments, the deaminase is a YE1 (SEQ ID NO: 248). In some embodiments, the deaminase is a YEE (SEQ ID NO: 249). In some embodiments, the deaminase is a YE2 (SEQ ID NO: 250). In some embodiments, the deaminase is a EE (SEQ ID NO: 251). The YE1, YEE, YE2, and EE variants are disclosed in International Publication No. WO 2018/0176009, herein incorporated by reference.

[0280] Grunewald et al. recently reported APOBEC1 mutants with R33A and R33A+K34A mutations, which conferred lower off-target RNA editing. Thus, in some embodiments, the cytidine deaminase comprises R33A (SEQ ID NO: 252) or R33A+K34A (SEQ ID NO: 253) variants. To further increase the target sequence compatibility of R33A+K34A-BE4, which exhibits a relatively stringent 5′-TC requirement for base editing, H122L and D124N, two mutations that were recently found during the continuous evolution of APOBEC1 to enable efficient deamination of 5′-GC substrates, was engineered and disclosed in Thuronyi et al. The resulting R33A+K34A+H122L+D124N variant is hereafter referred to as AALN. Thus, in some embodiments, the deaminase is an AALN (SEQ ID NO: 254). The AALN variant is also disclosed in International Publication No. WO 2019/023680. In some embodiments, the deaminase is at least 80%, at least 85%, at least 90%, at least 92%, at least 95%, at least 96%, at least 97%, at least 98%, at least 99%, or at least 99.5% identical to any one of the amino acid sequences set forth in SEQ ID NOs: 248-254.

[0281] Additionally, FERNY, a truncated, ancestrally reconstructed deaminase, which lacks an RNA-binding motif that could mediate nonspecific interactions with nucleic acids, was reported in Thuronyi et al. An evolved FERNY (evoFERNY), comprising an H102P and D104N substitutions, that was engineered by PACE to possess improved deamination of 5′-GC substrates, was also disclosed in Thuronyi et al. Accordingly, in other embodiments, the deaminase is a FERNY (SEQ ID NO: 255) or an evoFERNY (SEQ ID NO: 256).

[0282] Some aspects of the disclosure are based on the recognition that modulating the deaminase domain catalytic activity of any of the CBEs provided herein, for example by making point mutations in the deaminase domain, affect the processivity of the CBEs. For example, mutations that reduce, but do not eliminate, the catalytic activity of a deaminase domain of the base editor can make it less likely that the deaminase domain will catalyze the deamination of a residue adjacent to a target residue, thereby narrowing the deamination window. The ability to narrow the deaminataion window may prevent unwanted deamination of residues adjacent of specific target residues, which may decrease or prevent off-target effects.

[0283] Exemplary suitable deaminase domains that can be fused to Cas9 domains according to aspects of this disclosure are provided below. It should be understood that, in some embodiments, the active domain of the respective sequence can be used, e.g., the domain without a localizing signal (nuclear localization sequence, without nuclear export signal, cytoplasmic localizing signal).

[0284] In some embodiments, the cytidine deaminase domain of the disclosed base editors is at least 95%, at least 96%, at least 97%, at least 98%, at least 99%, or at least 99.5% identical to the deaminase domain of any one of SEQ ID NOs: 238-256, provided below. In some embodiments, the cytidine deaminase domain comprises the amino acid sequence of any one of SEQ ID NOs: 238-256.

Rat APOBEC1
(SEQ ID NO: 238)
[sequence omitted]
Human APOBEC1
(SEQ ID NO: 239)
MTSEKGPSTGDPTLRRRIEPWEFDVFYDPRELRKEACLLYEIKWGMSRKIWRSSGKNTTNH
VEVNFIKKFTSERDFHPSMSCSITWFLSWSPCWECSQAIREFLSRHPGVTLVIYVARLFWHM
DQQNRQGLRDLVNSGVTIQIMRASEYYHCWRNFVNYPPGDEAHWPQYPPLWMMLYALEL
HCIILSLPPCLKISRRWQNHLTFFRLHLQNCHYQTIPPHILLATGLIHPSVAWR
Human APOBEC3A
(SEQ ID NO: 240)
MSEASPASGPRHLMDPHIFTSNFNNGIGRHKTYLCYEVERLDNGTSVKMDQHRGFLHNQA
KNLLCGFYGRHAELRFLDLVPSLQLDPAQIYRVTWFISWSPCFSWGCAGEVRAFLQENTHV
RLRIFAARIYDYDPLYKEALQMLRDAGAQVSIMTYDEFKHCWDTFVDHQGCPFQPWDGLD
EHSQALSGRLRAILQNQGN
Human APOBEC3B
(SEQ ID NO: 241)
MNPQIRNPMERMYRDTFYDNFENEPILYGRSYTWLCYEVKIKRGRSNLLWDTGVFRGQVY
FKPQYHAEMCFLSWFCGNQLPAYKCFQITWFVSWTPCPDCVAKLAEFLSEHPNVTLTISAAR
LYYYWERDYRRALCRLSQAGARVTIMDYEEFAYCWENFVYNEGQQFMPWYKFDENYAFL
HRTLKEILRYLMDPDTFTFNFNNDPLVLRRRQTYLCYEVERLDNGTWVLMDQHMGFLCNE
AKNLLCGFYGRHAELRFLDLVPSLQLDPAQIYRVTWFISWSPCFSWGCAGEVRAFLQENTH
VRLRIFAARIYDYDPLYKEALQMLRDAGAQVSIMTYDEFEYCWDTFVYRQGCPFQPWDGL
EEHSQALSGRLRAILQNQGN
Human APOBEC3G
(SEQ ID NO: 242)
MKPHFRNTVERMYRDTFSYNFYNRPILSRRNTVWLCYEVKTKGPSRPPLDAKIFRGQVYSE
LKYHPEMRFFHWFSKWRKLHRDQEYEVTWYISWSPCTKCTRDMATFLAEDPKVTLTIFVA
RLYYFWDPDYQEALRSLCQKRDGPRATMKIMNYDEFQHCWSKFVYSQRELFEPWNNLPK
YYILLHIMLGEILRHSMDPPTFTFNFNNEPWVRGRHETYLCYEVERMHNDTWVLLNQRRGF
LCNQAPHKHGFLEGRHAELCFLDVIPFWKLDLDQDYRVTCFTSWSPCFSCAQEMAKFISKN
KHVSLCIFTARIYDDQGRCQEGLRTLAEAGAKISIMTYSEFKHCWDTFVDHQGCPFQPWDG
LDEHSQDLSGRLRAILQNQEN
Human AID
(SEQ ID NO: 243)
[sequence omitted]
Petromyzon marinus CDA1 (pmCDA1, or CDA)
(SEQ ID NO: 244)
MTDAEYVRIHEKLDIYTFKKQFFNNKKSVSHRCYVLFELKRRGERRACFWGYAVNKPQSGT
ERGIHAEIFSIRKVEEYLRDNPGQFTINWYSSWSPCADCAEKILEWYNQELRGNGHTLKIWA
CKLYYEKNARNQIGLWNLRDNGVGLNVMVSEHYQCCRKIFIQSSHNQLNENRWLEKTLKR
AEKRRSELSIMIQVKILHTTKSPAV
evoAPOBEC3A (eA3A)
(SEQ ID NO: 245)
MEASPASGPRHLMDPHIFTSNFNNGIGRHKTYLCYEVERLDNGTSVKMDQHRGFLHGQAK
NLLCGFYGRHAELRFLDLVPSLQLDPAQIYRVTWFISWSPCFSWGCAGEVRAFLQENTHVR
LRIFAARIYDYDPLYKEALQMLRDAGAQVSIMTYDEFKHCWDTFVDHQGCPFQPWDGLDE
HSQALSGRLRAILQNQGN
evoCDA
(SEQ ID NO: 246)
MTDAEYVRIHEKLDIYTFKKQFSNNKKSVSHRCYVLFELKRRGERRACFWGYAVNKPQSGT
ERGIHAEIFSIRKVEEYLRDNPGQFTINWYSSWSPCADCAEKILEWYNQELRGNGHTLKIWV
CKLYYEKNARNQIGLWNLRDNGVGLNVMVSEHYQCCRKIFIQSSHNQLNENRWLEKTLKR
AEKRRSELSIMFQVKILHTTKSPAV
evoAPOBEC1
(SEQ ID NO: 247)
MSSKTGPVAVDPTLRRRIEPHEFEVFFDPRELRKETCLLYEINWGGRHSIWRHTSQNTNKHV
EVNFIEKFTTERYFCPNTRCSITWFLSWSPCGECSRAITEFLSRYPNVTLFIYIARLYHLANPR
NRQGLRDLISSGVTIQIMTEQESGYCWHNFVNYSPSNESHWPRYPHLWVRLYVLELYCIILG
LPPCLNILRRKQSQLTSFTIALQSCHYQRLPPHILWATGLK
YE1
(SEQ ID NO: 248)
MSSETGPVAVDPTLRRRIEPHEFEVFFDPRELRKETCLLYEINWGGRHSIWRHTSQNTNKHV
EVNFIEKFTTERYFCPNTRCSITWFLSYSPCGECSRAITEFLSRYPHVTLFIYIARLYHHADPEN
RQGLRDLISSGVTIQIMTEQESGYCWRNFVNYSPSNEAHWPRYPHLWVRLYVLELYCIILGL
PPCLNILRRKQPQLTFFTIALQSCHYQRLPPHILWATGLK
YE2
(SEQ ID NO: 249)
MSSETGPVAVDPTLRRRIEPHEFEVFFDPRELRKETCLLYEINWGGRHSIWRHTSQNTNKHV
EVNFIEKFTTERYFCPNTRCSITWFLSYSPCGECSRAITEFLSRYPHVTLFIYIARLYHHADPRN
RQGLEDLISSGVTIQIMTEQESGYCWRNFVNYSPSNEAHWPRYPHLWVRLYVLELYCIILGL
PPCLNILRRKQPQLTFFTIALQSCHYQRLPPHILWATGLK
YEE
(SEQ ID NO: 250)
MSSETGPVAVDPTLRRRIEPHEFEVFFDPRELRKETCLLYEINWGGRHSIWRHTSQNTNKHV
EVNFIEKFTTERYFCPNTRCSITWFLSYSPCGECSRAITEFLSRYPHVTLFIYIARLYHHADPEN
RQGLEDLISSGVTIQIMTEQESGYCWRNFVNYSPSNEAHWPRYPHLWVRLYVLELYCIILGL
PPCLNILRRKQPQLTFFTIALQSCHYQRLPPHILWATGLK
EE
(SEQ ID NO: 251)
MSSETGPVAVDPTLRRRIEPHEFEVFFDPRELRKETCLLYEINWGGRHSIWRHTSQNTNKHV
EVNFIEKFTTERYFCPNTRCSITWFLSWSPCGECSRAITEFLSRYPHVTLFIYIARLYHHADPE
NRQGLEDLISSGVTIQIMTEQESGYCWRNFVNYSPSNEAHWPRYPHLWVRLYVLELYCIILG
LPPCLNILRRKQPQLTFFTIALQSCHYQRLPPHILWATGLK
R33A
(SEQ ID NO: 252)
MSSETGPVAVDPTLRRRIEPHEFEVFFDPRELAKETCLLYEINWGGRHSIWRHTSQNTNKHV
EVNFIEKFTTERYFCPNTRCSITWFLSWSPCGECSRAITEFLSRYPHVTLFIYIARLYHHADPR
NRQGLRDLISSGVTIQIMTEQESGYCWRNFVNYSPSNEAHWPRYPHLWVRLYVLELYCIILG
LPPCLNILRRKQPQLTFFTIALQSCHYQRLPPHILWATGLK
R33A + K34A
(SEQ ID NO: 253)
MSSETGPVAVDPTLRRRIEPHEFEVFFDPRELAAETCLLYEINWGGRHSIWRHTSQNTNKHV
EVNFIEKFTTERYFCPNTRCSITWFLSWSPCGECSRAITEFLSRYPHVTLFIYIARLYHHADPR
NRQGLRDLISSGVTIQIMTEQESGYCWRNFVNYSPSNEAHWPRYPHLWVRLYVLELYCIILG
LPPCLNILRRKQPQLTFFTIALQSCHYQRLPPHILWATGLK
AALN
(SEQ ID NO: 254)
MSSETGPVAVDPTLRRRIEPHEFEVFFDPRELAAETCLLYEINWGGRHSIWRHTSQNTNKHV
EVNFIEKFTTERYFCPNTRCSITWFLSWSPCGECSRAITEFLSRYPHVTLFIYIARLYHLANPR
NRQGLRDLISSGVTIQIMTEQESGYCWRNFVNYSPSNEAHWPRYPHLWVRLYVLELYCIILG
LPPCLNILRRKQPQLTFFTIALQSCHYQRLPPHILWATGLK
FERNY
(SEQ ID NO: 255)
MFERNYDPRELRKETYLLYEIKWGKSGKLWRHWCQNNRTQHAEVYFLENIFNARRFNPST
HCSITWYLSWSPCAECSQKIVDFLKEHPNVNLEIYVARLYYHEDERNRQGLRDLVNSGVTIR
IMDLPDYNYCWKTFVSDQGGDEDYWPGHFAPWIKQYSLKL
evoFERNY
(SEQ ID NO: 256)
MFERNYDPRELRKETYLLYEIKWGKSGKLWRHWCQNNRTQHAEVYFLENIFNARRFNPST
HCSITWYLSWSPCAECSQKIVDFLKEHPNVNLEIYVARLYYPENERNRQGLRDLVNSGVTIRI
MDLPDYNYCWKTFVSDQGGDEDYWPGHFAPWIKQYSLKL

### Additional Base Editor Elements

[0285] In various embodiments, the base editors disclosed herein further comprise one or more additional elements, e.g., linkers and localization sequences such as nuclear localization sequences (NLSs), nuclear export sequences, UGI domains, and other protein domains.

[0286] In some embodiments, the base editors disclosed herein further comprise one or more nuclear localization sequences. In some embodiments, the base editors comprise at least two NLSs. In certain embodiments, the base editors comprise two bipartite NLSs. In some embodiments, the disclosed base editors comprise more than two bipartite NLSs. In embodiments with at least two NLSs, the NLSs can be the same NLSs, or they can be different NLSs. In addition, the NLSs may be expressed as part of a cytosine base editor. The location of the NLS fusion can be at the N-terminus, the C-terminus, or within a sequence of a base editor (e.g., inserted between the napDNAbp domain (e.g., Cas9 domain) and cytidine deaminase domain).

[0287] A representative nuclear localization signal is a peptide sequence that directs the protein to the nucleus of the cell in which the sequence is expressed. A nuclear localization signal is predominantly basic, can be positioned almost anywhere in a protein's amino acid sequence, generally comprises a short sequence of four amino acids (Autieri & Agrawal, (1998) J. Biol. Chem. 273: 14731-37, incorporated herein by reference) to eight amino acids, and is typically rich in lysine and arginine residues (Magin et al., (2000) Virology 274: 11-16, incorporated herein by reference). Nuclear localization signals often comprise proline residues. A variety of nuclear localization signals have been identified and have been used to effect transport of biological molecules from the cytoplasm to the nucleus of a cell. See, e.g., Tinland et al., (1992) Proc. Natl. Acad. Sci. U.S.A. 89:7442-46; Moede et al., (1999) FEBS Lett. 461:229-34, which is incorporated herein by reference. Translocation is currently thought to involve nuclear pore proteins.

[0288] The NLSs may be any known NLS in the art. The NLSs may also be any NLSs for nuclear localization discovered in the future. The NLSs also may be any naturally occurring NLS, or any non-naturally occurring NLS (e.g., an NLS with one or more desired mutations).

[0289] A nuclear localization signal or sequence (NLS) is an amino acid sequence that tags, designates, or otherwise marks a protein for import into the cell nucleus by nuclear transport. Typically, this signal consists of one or more short sequences of positively charged lysines or arginines on the protein surface. Different nuclear localized proteins may share the same NLS. An NLS has the opposite function of a nuclear export signal (NES), which targets proteins out of the nucleus. A nuclear localization signal can also target the exterior surface of a cell. Thus, a single nuclear localization signal can direct the entity with which it is associated to the exterior of a cell and to the nucleus of a cell. Such sequences can be of any size and composition, for example, more than 25, 25, 15, 12, 10, 8, 7, 6, 5, or 4 amino acids, but will preferably comprise at least a four to eight amino acid sequence known to function as a nuclear localization signal (NLS).

[0290] The term “nuclear localization sequence” or “NLS” refers to an amino acid sequence that promotes import of a protein into the cell nucleus, for example, by nuclear transport. Nuclear localization sequences are known in the art and would be apparent to the skilled artisan. For example, NLS sequences are described in Plank et al., International PCT Application PCT/EP2000/011690, filed Nov. 23, 2000, published as WO/2001/038547 on May 31, 2001, the contents of which are incorporated herein by reference. In some embodiments, an NLS comprises the amino acid sequence PKKKRKV (SEQ ID NO: 283), MDSLLMNRRKFLYQFKNVRWAKGRRETYLC (SEQ ID NO: 284), KRTADGSEFESPKKKRKV (SEQ ID NO: 285), or KRTADGSEFEPKKKRKV (SEQ ID NO: 286). In other embodiments, the NLS comprises the amino acid sequence: NLSKRPAAIKKAGQAKKKK (SEQ ID NO: 287), PAAKRVKLD (SEQ ID NO: 288), RQRRNELKRSF (SEQ ID NO: 289), or NQSSNFGPMKGGNFGGRSSGPYGGGGQYFAKPRNQGGY (SEQ ID NO: 290). In certain embodiments of the disclosed base editors, an N-terminal NLS comprising KRTADGSEFESPKKKRKV (SEQ ID NO: 285) and a C-terminal NLS comprising or KRTADGSEFEPKKKRKV (SEQ ID NO: 286) is used.

[0291] Most NLSs can be classified in three general groups: (i) a monopartite NLS exemplified by the SV40 large T antigen NLS (PKKKRKV (SEQ ID NO: 283)); (ii) a bipartite motif consisting of two basic domains separated by a variable number of spacer amino acids and exemplified by the Xenopus nucleoplasmin NLS (KRXXXXXXXXXXKKKL (SEQ ID NO: 291)); and (iii) noncanonical sequences such as M9 of the hnRNP Al protein, the influenza virus nucleoprotein NLS, and the yeast Gal4 protein NLS (Dingwall and Laskey, Trends Biochem Sci. 1991 December; 16(12):478-81).

[0292] Nuclear localization signals appear at various points in the amino acid sequences of proteins. NLSs have been identified at the N-terminus, the C-terminus, and in the central region of proteins. Thus, the specification provides base editors that may be modified with one or more NLSs at the C-terminus, the N-terminus, as well as at in internal region of the base editor. The residues of a longer sequence that do not function as component NLS residues should be selected so as not to interfere, for example tonically or sterically, with the nuclear localization signal itself. Therefore, although there are no strict limits on the composition of an NLS-comprising sequence, in practice, such a sequence can be functionally limited in length and composition.

[0293] The present disclosure contemplates any suitable means by which to modify a base editor to include one or more NLSs. In one aspect, the base editors can be engineered to express a base editor protein that is translationally fused at its N-terminus or its C-terminus (or both) to one or more NLSs, i.e., to form a base editor-NLS fusion construct. In other embodiments, the base editor-encoding nucleotide sequence can be genetically modified to incorporate a reading frame that encodes one or more NLSs in an internal region of the encoded base editor. In addition, the NLSs may include various amino acid linkers or spacer regions encoded between the base editor and the N-terminally, C-terminally, or internally-attached NLS amino acid sequence. Thus, the present disclosure also provides for nucleotide constructs, vectors, and host cells for expressing a base editor and one or more NLSs.

[0294] The base editors described herein may also comprise nuclear localization signals which are linked to a base editor through one or more linkers, e.g., polymeric, amino acid, polysaccharide, chemical, or nucleic acid linker element. In certain embodiments, the NLS is linked to a base editor using an XTEN linker, as set forth in SEQ ID NO: 301. The linkers within the contemplated scope of the disclosure are not intended to have any limitations and can be any suitable type of molecule (e.g., polymer, amino acid, polysaccharide, nucleic acid, lipid, or any synthetic chemical linker domain) and be joined to the base editor by any suitable strategy that effectuates forming a bond (e.g., covalent linkage, hydrogen bonding) between the base editor and the one or more NLSs.

[0295] In other embodiments, the base editors described herein may comprise one or more uracil glycosylase inhibitor (UGI) domains. In some embodiments, the base editors comprise two UGI domains. The UGI domain refers to a protein that is capable of inhibiting a uracil-DNA glycosylase base-excision repair enzyme.

[0296] In some embodiments, a UGI domain comprises a wild-type UGI or a UGI as set forth in SEQ ID NO: 292, or a variant thereof. In some embodiments, the UGI proteins provided herein include fragments of UGI and proteins homologous to a UGI or a UGI fragment. For example, in some embodiments, a UGI domain comprises a fragment of the amino acid sequence set forth in SEQ ID NO: 292. In some embodiments, a UGI fragment comprises an amino acid sequence that comprises at least 60%, at least 65%, at least 70%, at least 75%, at least 80%, at least 85%, at least 90%, at least 95%, at least 96%, at least 97%, at least 98%, at least 99%, or at least 99.5% of the amino acid sequence as set forth in SEQ ID NO: 292. In some embodiments, a UGI comprises an amino acid sequence homologous to the amino acid sequence set forth in SEQ ID NO: 292, or an amino acid sequence homologous to a fragment of the amino acid sequence set forth in SEQ ID NO: 292. In some embodiments, proteins comprising UGI or fragments of UGI or homologs of UGI or UGI fragments are referred to as “UGI variants.” A UGI variant shares homology to UGI, or a fragment thereof. For example a UGI variant is at least 70% identical, at least 75% identical, at least 80% identical, at least 85% identical, at least 90% identical, at least 95% identical, at least 96% identical, at least 97% identical, at least 98% identical, at least 99% identical, at least 99.5% identical, or at least 99.9% identical to a wild type UGI or a UGI as set forth in SEQ ID NO: 292. In some embodiments, the UGI variant comprises a fragment of UGI, such that the fragment is at least 70% identical, at least 80% identical, at least 90% identical, at least 95% identical, at least 96% identical, at least 97% identical, at least 98% identical, at least 99% identical, at least 99.5% identical, or at least 99.9% to the corresponding fragment of wild-type UGI or a UGI as set forth in SEQ ID NO: 292. In some embodiments, the UGI comprises the following amino acid sequence:

[0297] >spIP147391UNGI_BPPB2 Uracil-DNA glycosylase inhibitor MTNLSDIIEKETGKQLVIQESILMLPEEVEEVIGNKPESDILVHTAYDESTDENVMLLTSDAPE YKPWALVIQDSNGENKIKML (SEQ ID NO: 292).

[0298] The base editors described herein also may include one or more additional elements. In certain embodiments, an additional element may comprise an effector of base repair, such as an inhibitor of base repair.

[0299] In some embodiments, the base editors described herein may comprise one or more heterologous protein domains (e.g., about or more than about 1, 2, 3, 4, 5, 6, 7, 8, 9, 10, or more domains in addition to the base editor components). A base editor may comprise any additional protein sequence, and optionally a linker sequence between any two domains. Other exemplary features that may be present are localization sequences, such as cytoplasmic localization sequences, export sequences, such as nuclear export sequences, or other localization sequences, as well as sequence tags.

[0300] Examples of protein domains that may be fused to a base editor or component thereof (e.g., the napDNAbp domain, the cytidine deaminase domain, or the NLS domain) include, without limitation, epitope tags and reporter gene sequences. Non-limiting examples of epitope tags include histidine (His) tags, V5 tags, FLAG tags, influenza hemagglutinin (HA) tags, Myc tags, VSV-G tags, and thioredoxin (Trx) tags. Examples of reporter genes include, but are not limited to, glutathione-5-transferase (GST), horseradish peroxidase (HRP), chloramphenicol acetyltransferase (CAT), beta-galactosidase, beta-glucuronidase, luciferase, green fluorescent protein (GFP), HcRed, DsRed, cyan fluorescent protein (CFP), yellow fluorescent protein (YFP), and autofluorescent proteins including blue fluorescent protein (BFP). A base editor may be fused to a gene sequence encoding a protein or a fragment of a protein that binds DNA molecules or binds other cellular molecules, including, but not limited to, maltose binding protein (MBP), S-tag, Lex A DNA binding domain (DBD) fusions, GAL4 DNA binding domain fusions, and herpes simplex virus (HSV) BP16 protein fusions. Additional domains that may form part of a base editor are described in US Patent Publication No. 2011/0059502, published Mar. 10, 2011, and incorporated herein by reference in its entirety.

[0301] The reporter gene sequences that may be used with the base editors, methods and systems disclosed herein include, but are not limited to, glutathione-5-transferase (GST), horseradish peroxidase (HRP), chloramphenicol acetyltransferase (CAT), beta-galactosidase, beta-glucuronidase, luciferase, green fluorescent protein (GFP), HcRed, DsRed, cyan fluorescent protein (CFP), yellow fluorescent protein (YFP), and autofluorescent proteins including blue fluorescent protein (BFP), HSV thymidine kinase, rpoB, may be introduced into a cell to encode a gene into which a mutation may be introduced that will confer resistance to a particular medium in a growth selection assay for the described system.

[0302] Other exemplary features that may be present are tags that are useful for solubilization, purification, or detection of the CBEs. Suitable protein tags provided herein include, but are not limited to, biotin carboxylase carrier protein (BCCP) tags, myc-tags, calmodulin-tags, FLAG-tags, hemagglutinin (HA)-tags, bgh-PolyA tags, polyhistidine tags, and also referred to as histidine tags or His-tags, maltose binding protein (MBP)-tags, nus-tags, glutathione-S-transferase (GST)-tags, green fluorescent protein (GFP)-tags, thioredoxin-tags, S-tags, Softags (e.g., Softag 1, Softag 3), strep-tags, biotin ligase tags, FlAsH tags, V5 tags, and SBP-tags. Additional suitable sequences will be apparent to those of skill in the art. In some embodiments, the CBE may comprise one or more His tags.

### Linkers

[0303] In certain embodiments, linkers may be used to link any of the peptides or peptide domains or domains of the base editor (e.g., a napDNAbp domain covalently linked to a cytidine deaminase domain which is covalently linked to an NLS domain). The base editors described herein may comprise linkers of 32 amino acids and/or 9 amino acids in length. In certain embodiments, the disclosed base editors comprise a first linker of 32 amino acids in length and a second linker of 9 amino acids in length.

[0304] As defined above, the term “linker,” as used herein, refers to a chemical group or a molecule linking two molecules or domains, e.g., a napDNAbp binding domain and a cleavage domain of a nuclease. In some embodiments, a linker joins an nCas9 and deaminase domains. Typically, the linker is positioned between, or flanked by, two groups, molecules, or other domains and connected to each one via a covalent bond, thus connecting the two. In some embodiments, the linker is an amino acid or a plurality of amino acids (e.g., a peptide or protein). In some embodiments, the linker is an organic molecule, group, polymer, or chemical domain. Chemical domains include, but are not limited to, disulfide, thermophi, thiol, amide, ester, carbon-carbon bond, carbon-heteroatom bond, urea, carbamate, and azo moieties.

[0305] The linker may comprise a peptide or a non-peptide moiety. In some embodiments, the linker is 5-100 amino acids in length, for example, 5, 6, 7, 8, 9, 10, 11, 12, 13, 14, 15, 16, 17, 18, 19, 20, 21, 22, 23, 24, 25, 26, 27, 28, 29, 30, 30-35, 35-40, 40-45, 45-50, 50-60, 60-70, 70-80, 80-90, 90-100, 100-150, or 150-200 amino acids in length. In some embodiments, the linker is a single atom in length. In certain embodiments, the linker is 32 amino acids, 16 amino acids, and/or 9 amino acids in length. Longer or shorter linkers are also contemplated.

[0306] The linker may be as simple as a covalent bond, or it may be a multi-atom linker or polymeric linker many atoms in length. In certain embodiments, the linker is a polypeptide or based on amino acids. In other embodiments, the linker is not peptide-like. In certain embodiments, the linker is a covalent bond (e.g., a carbon-carbon bond, disulfide bond, carbon-heteroatom bond, etc.). In certain embodiments, the linker is a carbon-nitrogen bond of an amide linkage. In certain embodiments, the linker is a cyclic or acyclic, substituted or unsubstituted, branched or unbranched aliphatic or heteroaliphatic linker. In certain embodiments, the linker is polymeric (e.g., polyethylene, polyethylene glycol, polyamide, polyester, polyether, etc.). In certain embodiments, the linker comprises a monomer, dimer, or polymer of aminoalkanoic acid. In certain embodiments, the linker comprises an aminoalkanoic acid (e.g., glycine, ethanoic acid, alanine, beta-alanine, 3-aminopropanoic acid, 4-aminobutanoic acid, 5-pentanoic acid, etc.). In certain embodiments, the linker comprises a monomer, dimer, or polymer of aminohexanoic acid (Ahx). In certain embodiments, the linker is based on a carbocyclic domain (e.g., cyclopentane, cyclohexane). In other embodiments, the linker comprises a polyethylene glycol domain (PEG). In other embodiments, the linker comprises amino acids. In certain embodiments, the linker comprises a peptide. In certain embodiments, the linker comprises an aryl or heteroaryl domain. In certain embodiments, the linker is based on a phenyl ring. The linker may included funtionalized domains to facilitate attachment of a nucleophile (e.g., thiol, amino) from the peptide to the linker. Any electrophile may be used as part of the linker. Exemplary electrophiles include, but are not limited to, activated esters, activated amides, Michael acceptors, alkyl halides, aryl halides, acyl halides, and isothiocyanates.

[0307] In some other embodiments, the linker comprises the amino acid sequence (GGGGS)ₙ (SEQ ID NO: 293), (G)ₙ(SEQ ID NO: 294), (EAAAK)ₙ (SEQ ID NO: 295), (GGS)ₙ (SEQ ID NO: 296), (SGGS)ₙ(SEQ ID NO: 297), (XP). (SEQ ID NO: 298), or any combination thereof, wherein n is independently an integer between 1 and 30, and wherein X is any amino acid. In some embodiments, the linker comprises the amino acid sequence (GGS)ₙ(SEQ ID NO: 299), wherein n is 1, 3, or 7. In some embodiments, the linker comprises the amino acid sequence SGSETPGTSESATPES (SEQ ID NO: 300). In exemplary embodiments, the linker comprises the 32-amino acid sequence SGGSSGGSSGSETPGTSESATPESSGGSSGGS (SEQ ID NO: 301), also known as an XTEN linker. In some embodiments, the linker comprises the 9-amino acid sequence SGGSGGSGGS (SEQ ID NO: 302). In some embodiments, the linker comprises the 4-amino acid sequence SGGS (SEQ ID NO: 303).

[0308] In some embodiments, any of the disclosed cytosine base editors comprises the structure [cytidine deaminase domain]-[optional linker sequence]-[dCas9 or Cas9 nickase]-[optional linker sequence], or [dCas9 or Cas9 nickase]-[optional linker sequence]-[cytidine deaminase domain].

### Guide Sequences (e.g., Guide RNAs)

[0309] The present disclosure further provides guide RNAs for use in accordance with the disclosed methods of editing and systems and methods for determining off-target effects of base editors. The disclosure provides guide RNAs that are designed to recognize target sequences. Such gRNAs may be designed to have guide sequences (or “spacers”) having complementarity to a protospacer within the target sequence. The disclosure further provides guide RNAs that are designed to recognize sequences other than the target sequences, or off-target sequences. Such gRNAs may be designed to have guide sequences having complementarity to a protospacer within one or more off-target sequences.

[0310] Guide RNAs are also provided for use with one or more of the disclosed base editors, e.g., in the disclosed methods of editing a nucleic acid molecule. Such gRNAs may be designed to have guide sequences having complementarity to a protospacer within a target sequence to be edited, and to have backbone sequences that interact specifically with the napDNAbp domains of any of the disclosed base editors, such as Cas9 nickase domains of the disclosed base editors.

[0311] In various embodiments, the base editors may be complexed, bound, or otherwise associated with (e.g., via any type of covalent or non-covalent bond) one or more guide sequences. The guide sequence becomes associated or bound to the base editor and directs its localization to a specific target sequence having complementarity to the guide sequence or a portion thereof. The particular design embodiments of a guide sequence will depend upon the nucleotide sequence of a genomic target sequence (i.e., the desired site to be edited) and the type of napDNAbp (e.g., type of Cas9 protein) present in the base editor, among other factors, such as PAM sequence locations, percent G/C content in the target sequence, the degree of microhomology regions, secondary structures, etc.

[0312] In general, a guide sequence is any polynucleotide sequence having sufficient complementarity with a target polynucleotide sequence to hybridize with the target sequence and direct sequence-specific binding of the napDNAbp (e.g., a Cas9 or Cas9 variant) to the target sequence. In some embodiments, the degree of complementarity between a guide sequence and its corresponding target sequence, when optimally aligned using a suitable alignment algorithm, is about or more than about 50%, 60%, 75%, 80%, 85%, 90%, 95%, 97.5%, 99%, or more. Optimal alignment may be determined with the use of any suitable algorithm for aligning sequences, non-limiting example of which include the Smith-Waterman algorithm, the Needleman-Wunsch algorithm, algorithms based on the Burrows-Wheeler Transform (e.g., the Burrows Wheeler Aligner), ClustalW, Clustal X, BLAT, Novoalign (Novocraft Technologies, ELAND (Illumina, San Diego, Calif.), SOAP (available at soap.genomics.org.cn), and Maq (available at maq.sourceforge.net).

[0313] In various embodiments of the assays and systems disclosed herein for measuring off-target frequencies, further provided herein are guide sequences that directs localization of a base editor and/or isolated Cas9 protein to a specific off-target site that is unrelated to a target sequence and has complementarity to the guide sequence or a portion thereof. The particular design embodiments of a guide sequence will depend upon the nucleotide sequence of a genomic off-target site of interest and the type of napDNAbp (e.g., type of Cas9 protein) present in the base editor, among other factors, such as PAM sequence locations, percent G/C content in the target sequence, the degree of microhomology regions, secondary structures, etc. For this purpose, a guide sequence is any polynucleotide sequence having sufficient complementarity with an off-target polynucleotide sequence to hybridize with this sequence and direct sequence-specific binding of the napDNAbp (e.g., a Cas9 or Cas9 variant) to the sequence. In some embodiments, the degree of complementarity between a guide sequence and its corresponding off-target sequence, when optimally aligned using a suitable alignment algorithm, is about or more than about 50%, 60%, 75%, 80%, 85%, 90%, 95%, 97.5%, 99%, or more.

[0314] In some embodiments, a guide sequence is about or more than about 5, 10, 11, 12, 13, 14, 15, 16, 17, 18, 19, 20, 21, 22, 23, 24, 25, 26, 27, 28, 29, 30, 35, 40, 45, 50, 75, or more nucleotides in length. In some embodiments, each gRNA comprises a guide sequence of at least 10 contiguous nucleotides (e.g., 10, 11, 12, 13, 14, 15, 16, 17, 18, 19, 20, 21, 22, 23, 24, 25, 26, 27, 28, 29, or 30 contiguous nucleotides) that is complementary to a target sequence (or off-target site).

[0315] In some embodiments, a guide sequence is less than about 200, 175, 150, 125, 100, 75, 50, 45, 40, 35, 30, 25, 20, 15, 12, or fewer nucleotides in length. The ability of a guide sequence to direct sequence-specific binding of a base editor to a target sequence may be assessed by any suitable assay. For example, the components of a base editor, including the guide sequence to be tested, may be provided to a host cell having the corresponding target sequence, such as by transfection with vectors encoding the components of a base editor disclosed herein, followed by an assessment of preferential cleavage within the target sequence. Similarly, cleavage of a target polynucleotide sequence may be evaluated in situ by providing the target sequence, components of a base editor, including the guide sequence to be tested and a control guide sequence different from the test guide sequence, and comparing binding or rate of cleavage at the target sequence between the test and control guide sequence reactions. Other assays are possible, and will occur to those skilled in the art.

[0316] A guide sequence may be selected to target any target sequence. In some embodiments, the target sequence is a sequence within a genome of a cell. Exemplary target sequences include those that are unique in the target genome. For example, for the S. pyogenes Cas9, a unique target sequence in a genome may include a Cas9 target site of the form MMMMMMMMNNNNNNNNNNNNXGG (SEQ ID NO: 58) where NNNNNNNNNNNNXGG (N is A, G, T, or C; and X can be anything) (SEQ ID NO: 59) has a single occurrence in the genome. A unique target sequence in a genome may include an S. pyogenes Cas9 target site of the form MMMMMMMMMNNNNNNNNNNNXGG (SEQ ID NO: 60), where NNNNNNNNNNNXGG (N is A, G, T, or C; and X can be anything) (SEQ ID NO: 61) has a single occurrence in the genome. For the S. 187hermophiles CRISPR1 Cas9, a unique target sequence in a genome may include a Cas9 target site of the form MMMMMMMMNNNNNNNNNNNNXXAGAAW (SEQ ID NO: 62) where NNNNNNNNNNNNXXAGAAW (N is A, G, T, or C; X can be anything; and W is A or T) (SEQ ID NO: 63) has a single occurrence in the genome. A unique target sequence in a genome may include an S. 187hermophiles CRISPR 1 Cas9 target site of the form MMMMMMMMMNNNNNNNNNNNXXAGAAW (SEQ ID NO: 64) where NNNNNNNNNNNXXAGAAW (N is A, G, T, or C; X can be anything; and W is A or T) (SEQ ID NO: 65) has a single occurrence in the genome. For the S. pyogenes Cas9, a unique target sequence in a genome may include a Cas9 target site of the form MMMMMMMMNNNNNNNNNNNNXGGXG (SEQ ID NO: 66) where NNNNNNNNNNNNXGGXG (N is A, G, T, or C; and X can be anything) (SEQ ID NO: 67) has a single occurrence in the genome. A unique target sequence in a genome may include an S. pyogenes Cas9 target site of the form MMMMMMMMMNNNNNNNNNNNXGGXG (SEQ ID NO: 68) where NNNNNNNNNNNXGGXG (N is A, G, T, or C; and X can be anything) (SEQ ID NO: 69) has a single occurrence in the genome. In each of these sequences “M” may be A, G, T, or C, and need not be considered in identifying a sequence as unique.

[0317] In some embodiments, a guide sequence is selected to reduce the degree of secondary structure within the guide sequence. Secondary structure may be determined by any suitable polynucleotide folding algorithm. Some programs are based on calculating the minimal Gibbs free energy. An example of one such algorithm is mFold, as described by Zuker & Stiegler (Nucleic Acids Res. 9 (1981), 133-148). Another example folding algorithm is the online webserver RNAfold, developed at Institute for Theoretical Chemistry at the University of Vienna, using the centroid structure prediction algorithm (see, e.g., A. R. Gruber et al., 2008, Cell 106(1): 23-24; and PA Carr & GM Church, 2009, Nature Biotechnology 27(12): 1151-62). Additional algorithms may be found in Chuai, G. et al., DeepCRISPR: optimized CRISPR guide RNA design by deep learning, Genome Biol. 19:80 (2018), and U.S. Application Ser. No. 61/836,080 and U.S. Pat. No. 8,871,445, issued Oct. 28, 2014, the entireties of each of which are incorporated herein by reference.

[0318] The disclosed systems and methods for determining off-target effects rely on the use of multiple unique guide RNA sequences, including guide RNA sequences that are engineered to interact specifically with certain napDNAbp proteins, such as Cas9 proteins (see FIG. 2E). Accordingly, guide RNAs are provided for use in accordance with the disclosed eukaryotic cell systems, and for use in accordance with the disclosed prokaryotic cell systems.

[0319] The guide sequence of the gRNA is linked to a tracr mate (also known as a “backbone”) sequence which in turn hybridizes to a tracr sequence. A tracr mate sequence includes any sequence that has sufficient complementarity with a tracr sequence to promote one or more of: (1) excision of a guide sequence flanked by tracr mate sequences in a cell containing the corresponding tracr sequence; and (2) formation of a complex at a target sequence, wherein the complex comprises the tracr mate sequence hybridized to the tracr sequence. In general, degree of complementarity is with reference to the optimal alignment of the tracr mate sequence and tracr sequence, along the length of the shorter of the two sequences. Optimal alignment may be determined by any suitable alignment algorithm, and may further account for secondary structures, such as self-complementarity within either the tracr sequence or tracr mate sequence. In some embodiments, the degree of complementarity between the tracr sequence and tracr mate sequence along the length of the shorter of the two when optimally aligned is about or more than about 25%, 30%, 40%, 50%, 60%, 70%, 80%, 90%, 95%, 97.5%, 99%, or higher. In some embodiments, the tracr sequence is about or more than about 5, 6, 7, 8, 9, 10, 11, 12, 13, 14, 15, 16, 17, 18, 19, 20, 25, 30, 40, 50, or more nucleotides in length. In some embodiments, the tracr sequence and tracr mate sequence are contained within a single transcript, such that hybridization between the two produces a transcript having a secondary structure, such as a hairpin. Preferred loop forming sequences for use in hairpin structures are four nucleotides in length, and most preferably have the sequence GAAA. However, longer or shorter loop sequences may be used, as may alternative sequences. The sequences preferably include a nucleotide triplet (for example, AAA), and an additional nucleotide (for example C or G). Examples of loop forming sequences include CAAA and AAAG. In an embodiment of the invention, the transcript or transcribed polynucleotide sequence has at least two or more hairpins. In certain embodiments, the transcript has two, three, four or five hairpins. In a further embodiment of the invention, the transcript has at most five hairpins. In some embodiments, the single transcript further includes a transcription termination sequence; preferably this is a polyT sequence, for example six T nucleotides. Further non-limiting examples of single polynucleotides comprising a guide sequence, a tracr mate sequence, and a tracr sequence are as follows (listed 5′ to 3′), where “N” represents a base of a guide sequence, the first block of lower case letters represent the tracr mate sequence, and the second block of lower case letters represent the tracr sequence, and the final poly-T sequence represents the transcription terminator: (1) NNNNNNNNgtttttgtactctcaagatttaGAAAtaaatcttgcagaagctacaaagataaggctt catgccgaaatcaacaccctgtcattttatggcagggtgttttcgttatttaaTTTTTT (SEQ ID NO: 71); (2) NNNNNNNNNNNNNNNNNNgtttttgtactctcaGAAAtgcagaagctacaaagataaggcttcatgccgaaatca acaccctgtcattttatggcagggtgttttcgttatttaaTTTTTT (SEQ ID NO: 72); (3) NNNNNNNNNNNNNNNNNNNNgtttttgtactctcaGAAAtgcagaagctacaaagataaggcttcatgccgaaatca acaccctgtcattttatggcagggtgtTTTTT (SEQ ID NO: 73); (4) NNNNNNNNNNNNNNNNNNNNgttttagagctaGAAAtagcaagttaaaataaggctagtccgttatcaacttgaaaa agtggcaccgagtcggtgcTTTTTT (SEQ ID NO: 74); (5) NNNNNNNNNNNNNNNNNNNNgttttagagctaGAAATAGcaagttaaaataaggctagtccgttatcaacttgaa aaagtgTTTTTTT (SEQ ID NO: 75); and (6) NNNNNNNNNNNNNNNNNNNNgttttagagctagAAATAGcaagttaaaataaggctagtccgttatcaTTTTT TTT (SEQ ID NO: 76). In some embodiments, sequences (1) to (3) are used in combination with Cas9 from S. Thermophiles CRISPR1. In some embodiments, sequences (4) to (6) are used in combination with Cas9 from S. pyogenes. In some embodiments, the tracr sequence is a separate transcript from a transcript comprising the tracr mate sequence.

[0320] In some embodiments, the guide RNAs for use in accordance with the disclosed methods of editing comprise a backbone structure that is recognized by an S. pyogenes Cas9 protein or domain, such as an SpCas9 domain of the disclosed base editors. The backbone structure recognized by an SpCas9 protein may comprise the sequence 5′-[guide sequence]-guuuuagagcuagaaauagcaaguuaaaauaaggcuaguccguuaucaacuugaaaaaguggcaccgagucggugcuuuuu-3′ (SEQ ID NO: 80), wherein the guide sequence comprises a sequence that is complementary to the protospacer of the target sequence. See U.S. Publication No. 2015-0166981, published Jun. 18, 2015, the disclosure of which is incorporated by reference herein. The guide sequence is typically 20 nucleotides long.

[0321] In other embodiments, the guide RNAs for use in accordance with the disclosed methods of editing comprise a backbone structure that is recognized by an S. aureus Cas9 protein. The backbone structure recognized by an SaCas9 protein may comprise the sequence 5′-[guide sequence]-guuuuaguacucuguaaugaaaauuacagaaucuacuaaaacaaggcaaaaugccguguuuaucucgucaacuuguuggcgagau uuuuuu-3′ (SEQ ID NO: 81). In other embodiments, the guide RNAs for use in accordance with the disclosed methods of editing and methods of determining off-target effects in the comprise a backbone structure that is recognized by an S. aureus Cas9 protein, such as an isolated SaCas9 protein.

[0322] The sequences of suitable guide RNAs for targeting the disclosed CBEs to specific genomic target sites will be apparent to those of skill in the art based on the present disclosure. Such suitable guide RNA sequences typically comprise guide sequences that are complementary to a nucleic sequence within 50 nucleotides upstream or downstream of the target nucleobase pair to be edited. Some exemplary guide RNA sequences suitable for targeting any of the provided CBEs to specific target sequences are provided herein. Additional guide sequences are well known in the art and may be used with the base editors described herein. Additional exemplary guide sequences are disclosed in, for example, Jinek M., et al., Science 337:816-821(2012); Mali P, Esvelt K M & Church G M (2013) Cas9 as a versatile tool for engineering biology, Nature Methods, 10, 957-963; Li J F et al., (2013) Multiplex and homologous recombination-mediated genome editing in Arabidopsis and Nicotiana benthamiana using guide RNA and Cas9, Nature Biotechnology, 31, 688-691; Hwang, W. Y et al., Efficient genome editing in zebrafish using a CRISPR-Cas system, Nature Biotechnology 31, 227-229 (2013); Cong L et al., (2013) Multiplex genome engineering using CRIPSR/Cas systems, Science, 339, 819-823; Cho S W et al., (2013) Targeted genome engineering in human cells with the Cas9 RNA-guided endonuclease, Nature Biotechnology, 31, 230-232; Jinek, M. et al., RNA-programmed genome editing in human cells, eLife 2, e00471 (2013); Dicarlo, J. E. et al., Genome engineering in Saccharomyces cerevisiae using CRISPR-Cas systems. Nucleic Acid Res. (2013); Briner A E et al., (2014) Guide RNA functional modules direct Cas9 activity and orthogonality, Mol Cell, 56, 333-339, the entire contents of each of which are incorporated herein by reference.

### Methods for Making Base Editors

[0323] The disclosure further relates in various aspects to methods of making the disclosed base editors by various modes of manipulation that include, but are not limited to, codon optimization of one or more domains of the disclosed base editors to achieve greater expression levels in a cell, and the use of nuclear localization sequences (NLSs), preferably at least two NLSs, e.g., two bipartite NLSs, to increase the localization of the expressed base editors into a cell nucleus. The base editors contemplated herein can include modifications that result in increased expression, for example, through codon optimization.

[0324] In some embodiments, the base editors (or any component thereof) is codon optimized for expression in particular cells, such as eukaryotic cells (e.g. mammalian cells or human cells). The eukaryotic cells may be those of or derived from a particular organism, such as a mammal, including, but not limited to, human, mouse, rat, rabbit, dog, or non-human primate. In general, codon optimization refers to a process of modifying a nucleic acid sequence for enhanced expression in the host cells of interest by replacing at least one codon (e.g., about or more than about 1, 2, 3, 4, 5, 10, 15, 20, 25, 50, or more codons) of the native sequence with codons that are more frequently or most frequently used in the genes of that host cell while maintaining the native amino acid sequence. Various species exhibit particular bias for certain codons of a particular amino acid. Codon bias (differences in codon usage between organisms) often correlates with the efficiency of translation of messenger RNA (mRNA), which is in turn believed to be dependent on, among other things, the properties of the codons being translated and the availability of particular transfer RNA (tRNA) molecules. The predominance of selected tRNAs in a cell is generally a reflection of the codons used most frequently in peptide synthesis. Accordingly, genes can be tailored for optimal gene expression in a given organism based on codon optimization. Codon usage tables are readily available, for example, at the “Codon Usage Database,” and these tables can be adapted in a number of ways. See Nakamura, Y., et al. “Codon usage tabulated from the international DNA sequence databases: status for the year 2000” Nucl. Acids Res. 28:292 (2000). Computer algorithms for codon optimizing a particular sequence for expression in a particular host cell are also available, such as Gene Forge (Aptagen; Jacobus, Pa.), are also available. In some embodiments, one or more codons (e.g., 1, 2, 3, 4, 5, 10, 15, 20, 25, 50, or more, or all codons) in a sequence encoding a CRISPR enzyme correspond to the most frequently used codon for a particular amino acid. In some embodiments, nucleic acid constructs are codon-optimized for expression in HEK293T cells. In some embodiments, nucleic acid constructs are codon-optimized for expression in mammalian cells. In some embodiments, nucleic acid constructs are codon-optimized for expression in human cells.

[0325] In other embodiments, the base editors of the invention have improved expression (as compared to non-modified or state of the art counterpart editors) as a result of ancestral sequence reconstruction analysis. Ancestral sequence reconstruction (ASR) is the process of analyzing modern sequences within an evolutionary/phylogenetic context to infer the ancestral sequences at particular nodes of a tree. Reference is made to Koblan et al., Nat Biotechnol. 2018; 36(9):843-846. These ancient sequences are most often then synthesized, recombinantly expressed in laboratory microorganisms or cell lines, and then characterized to reveal the ancient properties of the extinct biomolecules. This process has produced tremendous insights into the mechanisms of molecular adaptation and functional divergence. Despite such insights, a major criticism of ASR is the general inability to benchmark accuracy of the implemented algorithms. It is difficult to benchmark ASR for many reasons. Notably, genetic material is not preserved in fossils on a long enough time scale to satisfy most ASR studies (many millions to billions of years ago), and it is not yet physically possible to travel back in time to collect samples. Reference can be made to Cai et al., “Reconstruction of ancestral protein sequences and its applications,” BMC Evolutionary Biology 2004, 4:33; and Zakas et al., “Enhancing the pharmaceutical properties of protein drugs by ancestral sequence reconstruction,” Nature Biotechnology, 35-37 (2017), each of which are incorporated herein by reference. Exemplary base editors of the present disclosure that are engineered through ancestral reconstruction include ancestrally reconstructed BE4max base editors (AncBE4max).

[0326] There are many software packages available which can perform ancestral state reconstruction. Generally, these software packages have been developed and maintained through the efforts of scientists in related fields and released under free software licenses. The following list is not meant to be a comprehensive itemization of all available packages, but provides a representative sample of the extensive variety of packages that implement methods of ancestral reconstruction with different strengths and features: PAML (Phylogenetic Analysis by Maximum Likelihood, available at abacus.gene.ucl.ac.uk/software/paml.html), BEAST (Bayesian evolutionary analysis by sampling trees, available at www.beast2.org/wiki/index.php/Main_Page), and Diversitree (FitzJohn R G, 2012. Diversitree: comparative phylogenetic analyses of diversification in R. Methods in Ecology and Evolution), and HyPHy (Hypothesis testing using phylogenies, available at hyphy.org/w/index.php/Main_Page).

[0327] The above description is meant to be non-limiting with regard to making base editors for increased expression, and thereby increase editing efficiencies.

### High Efficiencies in Genomic Editing

[0328] In some embodiments, the target nucleotide sequence is a DNA sequence in a genome, e.g. a eukaryotic genome. In certain embodiments, the target nucleotide sequence is in a mammalian (e.g. a human) genome. In certain embodiments, the target nucleotide sequence is in a human genome. In other embodiments, the target nucleotide sequence is in the genome of a rodent, such as a mouse or rat. In other embodiments, the target nucleotide sequence is in the genome of a domesticated animal, such as a horse, cat, dog, or rabbit. In some embodiments, the target nucleotide sequence is in the genome of an experimental or research animal. In some embodiments, the target nucleotide sequence is in the genome of a plant. In some embodiments, the target nucleotide sequence is in the genome of a microorganism, such as a bacteria.

[0329] Some embodiments of the disclosure are based on the recognition that any of the base editors provided herein possess the ability to modify a specific nucleobase while generating a reduced frequency of indels. An “indel”, as used herein, refers to the insertion or deletion of a nucleobase within a nucleic acid. Such insertions or deletions can lead to frame shift mutations within a coding region of a gene. In some embodiments, it is desirable to generate base editors that efficiently modify (e.g., deaminate) a specific nucleotide within a nucleic acid, without generating a large number of insertions or deletions (i.e., indels) in the nucleic acid. In certain embodiments, any of the base editors provided herein are capable of generating a greater proportion of intended modifications (e.g., point mutations) versus indels.

[0330] In some embodiments, the base editors provided herein are capable of generating a ratio of intended point mutations to indels that is greater than 1:1. In some embodiments, the base editors provided herein are capable of generating a ratio of intended point mutations to indels that is at least 1.5:1, at least 2:1, at least 2.5:1, at least 3:1, at least 3.5:1, at least 4:1, at least 4.5:1, at least 5:1, at least 5.5:1, at least 6:1, at least 6.5:1, at least 7:1, at least 7.5:1, at least 8:1, at least 10:1, at least 12:1, at least 15:1, at least 20:1, at least 25:1, at least 30:1, at least 40:1, at least 50:1, at least 100:1, at least 200:1, at least 300:1, at least 400:1, at least 500:1, at least 600:1, at least 700:1, at least 800:1, at least 900:1, or at least 1000:1, or more. The number of intended mutations and indels may be determined using any suitable method. In some embodiments, to calculate indel frequencies, sequencing reads are scanned for exact matches to two 10-bp sequences that flank both sides of a window in which indels might occur. If no exact matches are located, the read is excluded from analysis. If the length of this indel window exactly matches the reference sequence the read is classified as not containing an indel. If the indel window is two or more bases longer or shorter than the reference sequence, then the sequencing read is classified as an insertion or deletion, respectively. Indel formation may be measured by techniques known in the art, including high-throughput screening of sequencing reads.

[0331] In some embodiments, the base editors provided herein are capable of limiting formation of indels in a region of a nucleic acid. In some embodiments, the region is at a nucleotide targeted by a base editor or a region within 2, 3, 4, 5, 6, 7, 8, 9, 10, 12, 14, 16, 18, 20 or 25 nucleotides of a nucleotide targeted by a base editor. In some embodiments, any of the base editors provided herein are capable of limiting the formation of indels at a region of a nucleic acid to less than 1%, less than 1.5%, less than 2%, less than 2.5%, less than 3%, less than 3.5%, less than 4%, less than 4.5%, less than 5%, less than 6%, less than 7%, less than 8%, less than 9%, less than 10%, less than 12%, less than 15%, or less than 20%. In some embodiments, any of the disclosed base editors are capable of limiting the formation of indels to less than 0.75%, less than 0.6%, less than 0.5%, less than 0.4%, less than 0.3%, or less than 0.2% in the target nucleic acid molecule. In certain embodiments, any of the disclosed base editors provide an indel formation frequency of about 0.5% or less in the target nucleic acid molecule.

[0332] The number of indels formed at a nucleic acid region may depend on the amount of time a nucleic acid (e.g., a nucleic acid within the genome of a cell) is exposed to a base editor. In some embodiments, an number or proportion of indels is determined after at least 1 hour, at least 2 hours, at least 6 hours, at least 12 hours, at least 24 hours, at least 36 hours, at least 48 hours, at least 3 days, at least 4 days, at least 5 days, at least 7 days, at least 10 days, or at least 14 days of exposing a nucleic acid (e.g., a nucleic acid within the genome of a cell) to a base editor.

[0333] Some embodiments of the disclosure are based on the recognition that the formation of indels in a region of a nucleic acid may be limited by nicking the non-edited strand opposite to the strand in which edits are introduced. This nick serves to direct mismatch repair machinery to the non-edited strand, ensuring that the chemically modified nucleobase is not interpreted as a lesion by the machinery. This nick may be created by the use of an nCas9. The methods provided in this disclosure comprise cutting (or nicking) the non-edited strand of the double-stranded DNA, for example, wherein the one strand comprises the T of the target G:C nucleobase pair.

[0334] Some embodiments of the disclosure are based on the recognition that any of the base editors provided herein are capable of efficiently generating an intended mutation, such as a point mutation, in a nucleic acid (e.g., a nucleic acid within a genome of a subject) without generating a significant number of unintended mutations, such as unintended point mutations. In some embodiments, an intended mutation is a mutation that is generated by a specific base editor bound to a gRNA, specifically designed to generate the intended mutation. In some embodiments, the intended mutation is intended to correct a mutation associated with a disease, disorder, or condition. In some embodiments, the mutation associated with a disease, disorder, or condition is a thymine (T) to cytosine (C) point mutation. In some embodiments, the mutation associated with a disease, disorder, or condition is an adenine (A) to guanine (G) point mutation.

[0335] In some embodiments, the disclosed editing methods result in an actual or average off-target DNA editing frequency of about 2.0% or less, 1.75% or less, 1.5% or less, 1.2% or less, 1% or less, 0.9% or less, 0.8% or less, 0.75% or less, 0.7% or less, 0.65% or less, or 0.6% or less. In some embodiments, the disclosed editing methods result in an actual or average off-target DNA editing frequency of 0.5%, less than 0.5%, less than 0.4%, less than 0.25%, less than 0.2%, less than 0.15%, less than 0.1%, less than 0.05%, or less than 0.025%. In a particular embodiment, the methods result in an actual or average off-target DNA editing frequency of about 0.4% (for instance, methods for evaluating the off-target frequencies of CBEs comprising YE1 deaminase). These off-target editing frequencies may be obtained in sequences having any level of sequence identity to the target sequence. As used herein to refer to off-target DNA editing frequencies, the modifier “average” refers to a mean value over all editing events detected at sites other than a given target nucleobase pair (e.g., as detected by high-throughput sequencing). Exemplary methods of high-throughput sequencing are described in, e.g., Example 3 of this disclosure.

[0336] In particular embodiments, the described editing methods generate (or exhibit) an average frequency of off-target editing of less than 1.5%. In some embodiments, the described editing methods generate (or exhibit) an average frequency of off-target editing of less than 1.25%, less than 1.0%, less than 0.75%, or less than 0.5%).

[0337] In some embodiments, the disclosed editing methods further result in an actual or average Cas9-independent off-target DNA editing frequency of about 2.0% or less, 1.75% or less, 1.5% or less, 1.2% or less, 1% or less, 0.9% or less, 0.8% or less, 0.75% or less, 0.7% or less, 0.65% or less, or 0.6% or less. In other words, the disclosed editing methods further result in an actual or average off-target DNA editing frequency of about 2.0% or less, 1.75% or less, 1.5% or less, 1.2% or less, 1% or less, 0.9% or less, 0.8% or less, 0.75% or less, 0.7% or less, 0.65% or less, or 0.6% or less in sequences having 60% or less sequence identity to the target sequence. In some embodiments, the disclosed editing methods result in an actual or average off-target DNA editing frequency of 0.5%, less than 0.5%, less than 0.4%, less than 0.25%, less than 0.2%, less than 0.15%, less than 0.1%, less than 0.05%, or less than 0.025%, in sequences having 60% or less sequence identity to the target sequence. In some embodiments, these editing frequencies are obtained in sequences comprising protospacer sequences having 5, 6, 7, 8, 9, 10, or more than 10 mismatches relative to protospacer sequence of the target sequence. In a particular embodiment, the methods result in an actual or average Cas9-independent off-target DNA editing frequency of 0.4% or less.

[0338] In various embodiments, the disclosed editing methods result in an on-target DNA base editing efficiency of at least about 35%, 40%, 50%, 60%, 70%, 80%, 85%, 90%, 95%, 98%, or 99% at the target nucleobase pair. The step of contacting may result in in a DNA base editing efficiency of at least about 60%, 61%, 62%, 63%, 64%, 65%, 66%, 67%, 68%, 69%, 70%, 71%, 72%, 73%, 74%, or 75%. In particular, the step of contacting results in on-target base editing efficiencies of greater than 75%. In certain embodiments, base editing efficiencies of 99% may be realized.

[0339] In some embodiments, the method results in less than 5%, or less than 10%, indel formation in the nucleic acid. In some embodiments, the method results in less than 2%, 1%, 0.5%, 0.2%, or 0.1% indel formation. In some embodiments, at least 5% of the intended base pairs in a population of cells or in tissues in vivo are edited. In some embodiments, at least 10%, 15%, 20%, 25%, 30%, 35%, 40%, 45%, or 50% of the intended base pairs in a population of cells or in tissues in vivo are edited.

[0340] In some embodiments, the ratio of intended products to unintended products in the target nucleotide is at least 2:1, 5:1, 10:1, 20:1, 30:1, 40:1, 50:1, 60:1, 70:1, 80:1, 90:1, 100:1, 200:1, or more. In some embodiments, the ratio of intended point mutation to indel formation is greater than 1:1, 10:1, 50:1, 100:1, 500:1, or 1000:1, or more.

[0341] In some embodiments, the intended mutation is a cytosine (C) to thymine (T) point mutation within the coding region of a gene. In some embodiments, the intended mutation is a guanine (G) to adenine (A) point mutation within the coding region of a gene. In some embodiments, the intended mutation is a point mutation that generates a stop codon, for example, a premature stop codon within the coding region of a gene.

### Vectors

[0342] Some aspects of this disclosure relate to polynucleotides and vector constructs for producing the disclosed base editors. Some aspects of this disclosure relate to cells (e.g., host cells) comprising the base editors, cells comprising the disclosed polynucleotides, and cells comprising the disclosed vectors.

[0343] Some aspects of this disclosure relate to methods of engineering and producing one or more components of the base editors disclosed herein. Further aspects relate to methods of engineering the base editors and complexes comprising one or more guide nucleic acid molecules (e.g., Cas9 guide RNAs) and a base editor, as provided herein. In addition, some embodiments of the disclosure provide methods of using the base editors for editing a target nucleic acid molecule (e.g., a genomic sequence, a cDNA sequence, or a viral DNA sequence).

[0344] In certain embodiments, methods of manufacturing the base editors for use in the methods of DNA editing, methods of treatment, on-target and off-target editing assays, pharmaceutical compositions, and kits disclosed herein comprise the use of recombinant protein expression methodologies and techniques known to those of skill in the art.

[0345] Several embodiments of the making and using of the base editors of the invention relate to vector systems comprising one or more vectors, or vectors as such. Likewise, several embodiments of the methods for determining off-target effects of base editors relate to vector systems comprising one or more vectors. Vectors may be designed to clone and/or express the base editors as disclosed herein. Vectors may also be designed to clone and/or express one ore more gRNAs having complementarity to the target sequence, as disclosed herein. Vectors may also be designed to transfect the base editors and gRNAs of the disclosure into one or more cells, e.g., a target diseased eukaryotic cell for treatment with the base editor systems and methods disclosed herein. Exemplary vectors utilized in the methods and systems provided in the Examples of the present disclosure comprise the BE4-P2A-GFP, YE1-P2A-GFP, YE1-NG-P2A-GFP, YE1-BE4-CP1028-P2A-GFP, and Cas9(D10A)-P2A-GFP plasmid vectors.

[0346] Vectors can be designed for expression of base editor transcripts (e.g., nucleic acid transcripts, proteins, or enzymes) in prokaryotic or eukaryotic cells. For example, base editor transcripts can be expressed in bacterial cells such as Escherichia coli, insect cells (using baculovirus expression vectors), yeast cells, plant cells, or mammalian cells. Suitable host cells are discussed further in Goeddel, Gene Expression Technology: Methods In Enzymology 185, Academic Press. San Diego, Calif. (1990). Alternatively, expression vectors encoding one or more base editors described herein can be transcribed and translated in vitro, for example, using T7 promoter regulatory sequences and T7 polymerase.

[0347] Vectors may be introduced and propagated in a prokaryotic cells. In some embodiments, a prokaryote is used to amplify copies of a vector to be introduced into a eukaryotic cell or as an intermediate vector in the production of a vector to be introduced into a eukaryotic cell (e.g., amplifying a plasmid as part of a viral vector packaging system). In some embodiments, a prokaryote is used to amplify copies of a vector and express one or more nucleic acids, such as to provide a source of one or more proteins for delivery to a host cell or host organism. Expression of proteins in prokaryotes is most often carried out in Escherichia coli with vectors containing constitutive or inducible promoters directing the expression of either fusion proteins or non-fusion proteins.

[0348] Fusion expression vectors also may be used to express the base editors of the disclosure. Such vectors generally add a number of amino acids to a protein encoded therein, such as to the amino terminus of the recombinant protein. Such fusion vectors may serve one or more purposes, such as: (i) to increase expression of a recombinant protein; (ii) to increase the solubility of a recombinant protein; and (iii) to aid in the purification of a recombinant protein by acting as a ligand in affinity purification. Often, in fusion expression vectors, a proteolytic cleavage site is introduced at the junction of the fusion domain and the recombinant protein to enable separation of the recombinant protein from the fusion domain subsequent to purification of the base editor. Such enzymes, and their cognate recognition sequences, include Factor Xa, thrombin and enterokinase. Exemplary fusion expression vectors include pGEX (Pharmacia Biotech Inc; Smith and Johnson, 1988. Gene 67: 31-40), pMAL (New England Biolabs, Beverly, Mass.) and pRIT5 (Pharmacia, Piscataway, N.J.) that fuse glutathione S-transferase (GST), maltose E binding protein, or protein A, respectively, to the target recombinant protein.

[0349] Examples of suitable inducible non-fusion E. coli expression vectors include pTrc (Amrann et al., (1988) Gene 69:301-315) and pET 11d (Studier et al., Gene Expression Technology: Methods In Enzymology 185, Academic Press, San Diego, Calif. (1990) 60-89).

[0350] In some embodiments, a vector is a yeast expression vector for expressing the base editors described herein. Examples of vectors for expression in yeast Saccharomyces cerivisae include pYepSec1 (Baldari, et al., 1987. EMBO J. 6: 229-234), pMFa (Kuijan and Herskowitz, 1982. Cell 30: 933-943), pJRY88 (Schultz et al., 1987. Gene 54: 113-123), pYES2 (Invitrogen Corporation, San Diego, Calif.), and picZ (InVitrogen Corp, San Diego, Calif.).

[0351] In some embodiments, a vector drives protein expression in insect cells using baculovirus expression vectors. Baculovirus vectors available for expression of proteins in cultured insect cells (e.g., SF9 cells) include the pAc series (Smith, et al., 1983. Mol. Cell. Biol. 3: 2156-2165) and the pVL series (Lucklow and Summers, 1989. Virology 170: 31-39).

[0352] In some embodiments, a vector is capable of driving expression of one or more sequences in mammalian cells using a mammalian expression vector. Examples of mammalian expression vectors include pCDM8 (Seed, 1987. Nature 329: 840) and pMT2PC (Kaufman, et al., 1987. EMBO J. 6: 187-195). When used in mammalian cells, the expression vector's control functions are typically provided by one or more regulatory elements. For example, commonly used promoters are derived from polyoma, adenovirus 2, cytomegalovirus, simian virus 40, and others disclosed herein and known in the art. For other suitable expression systems for both prokaryotic and eukaryotic cells see, e.g., Chapters 16 and 17 of Sambrook, et al., Molecular Cloning: A Laboratory Manual. 2nd ed., Cold Spring Harbor Laboratory, Cold Spring Harbor Laboratory Press, Cold Spring Harbor, N.Y., 1989.

[0353] In some embodiments, the recombinant mammalian expression vector is capable of directing expression of the nucleic acid preferentially in a particular cell type (e.g., tissue-specific regulatory elements are used to express the nucleic acid). Tissue-specific regulatory elements are known in the art. Non-limiting examples of suitable tissue-specific promoters include the albumin promoter (liver-specific; Pinkert, et al., 1987. Genes Dev. 1: 268-277), lymphoid-specific promoters (Calame and Eaton, 1988. Adv. Immunol. 43: 235-275), in particular promoters of T cell receptors (Winoto and Baltimore, 1989. EMBO J. 8: 729-733) and immunoglobulins (Baneiji, et al., 1983. Cell 33: 729-740; Queen and Baltimore, 1983. Cell 33: 741-748), neuron-specific promoters (e.g., the neurofilament promoter; Byrne and Ruddle, 1989. Proc. Natl. Acad. Sci. USA 86: 5473-5477), pancreas-specific promoters (Edlund, et al., 1985. Science 230: 912-916), and mammary gland-specific promoters (e.g., milk whey promoter, U.S. Pat. No. 4,873,316 and European Application Publication No. 264,166). Developmentally-regulated promoters are also encompassed, e.g., the murine hox promoters (Kessel and Gruss, 1990. Science 249: 374-379) and the α-fetoprotein promoter (Campes and Tilghman, 1989. Genes Dev. 3: 537-546).

### Methods of Editing a Target Nucleobase Pair, Methods of Treatment, and Uses for the Base Editors

[0354] Some embodiments of the disclosure provide methods for editing a target nucleobase pair in a nucleic acid (e.g., in a double-stranded DNA sequence). In some embodiments, the methods comprise the steps of contacting a target region of a nucleic acid (e.g., a double-stranded DNA sequence) with a complex comprising a base editor and a guide nucleic acid (e.g., gRNA), wherein the target region comprises a targeted nucleobase pair. As a result of certain embodiments of these methods, strand separation of said target region is induced, a first nucleobase of said target nucleobase pair in a single strand of the target region is converted to a second nucleobase, and no more than one strand of said target region is cut (or nicked), wherein a third nucleobase complementary to the first nucleobase base is replaced by a fourth nucleobase complementary to the second nucleobase.

[0355] The disclosed methods may further comprise cutting (or nicking) no more than one strand of the target region, whereby a third nucleobase complementary to the first nucleobase is replaced by a fourth nucleobase complementary to the second nucleobase. In certain embodiments, the first nucleobase is a cytosine (of the target C:G nucleobase pair). In some embodiments, the second nucleobase is a uracil (i.e., the C is converted to U). In some embodiments, the third nucleobase is a guanine (of the target C:G base pair), and the fourth nucleobase is a adenine. In some embodiments, the second nucleobase is replaced with a fifth nucleobase (thymine) that is complementary to the fourth nucleobase, thereby generating an intended edited base pair (e.g., a T:A pair).

[0356] In some embodiments, the intended edited base pair is upstream of a PAM site. In some embodiments, the intended edited base pair is 1, 2, 3, 4, 5, 6, 7, 8, 9, 10, 11, 12, 13, 14, 15, 16, 17, 18, 19, or 20 nucleotides upstream of the PAM site. In some embodiments, the intended edited base pair is downstream of a PAM site. In some embodiments, the intended edited base pair is 1, 2, 3, 4, 5, 6, 7, 8, 9, 10, 11, 12, 13, 14, 15, 16, 17, 18, 19, or 20 nucleotides downstream stream of the PAM site. In some embodiments, the target region comprises a target window, wherein the target window comprises the target nucleobase pair. In some embodiments, the target window comprises 1-10 nucleotides. In some embodiments, the target window is 1-9, 1-8, 1-7, 1-6, 1-5, 1-4, 1-3, 1-2, or 1 nucleotides in length. In some embodiments, the target window is 1, 2, 3, 4, 5, 6, 7, 8, 9, 10, 11, 12, 13, 14, 15, 16, 17, 18, 19, or 20 nucleotides in length. In some embodiments, the intended edited base pair is within the target window. In some embodiments, the target window comprises the intended edited base pair. In some embodiments, the method is performed using any of the base editors provided herein. In some embodiments, a target window is a editing window. In some embodiments, the target window is an editing window of 2-20 nucleotides, preferably 2-10 or 2-8 nucleotides.

[0357] In another embodiment, the disclosure provides editing methods comprising contacting a DNA, or RNA molecule with any of the base editors provided herein, and with at least one guide nucleic acid (e.g., guide RNA), wherein the guide nucleic acid, (e.g., guide RNA) is about 15-100 nucleotides long and comprises a sequence of at least 10 contiguous nucleotides that is complementary to a target sequence. In some embodiments, the 3′ end of the target sequence is immediately adjacent to a canonical PAM sequence (NGG). In some embodiments, the 3′ end of the target sequence is not immediately adjacent to a canonical PAM sequence (NGG). In some embodiments, the 3′ end of the target sequence is immediately adjacent to an AGC, GAG, TTT, GTG, or CAA sequence.

[0358] In some embodiments, the target nucleic acid sequence comprises a sequence associated with a disease, disorder, or condition. In some embodiments, the target nucleic acid sequence comprises a point mutation associated with a disease, disorder, or condition. In some embodiments, the activity of the base editor or the complex with a gRNA, results in a correction of the point mutation. In some embodiments, the target nucleic acid sequence comprises a T→C point mutation associated with a disease, disorder, or condition, and wherein the conversion of the mutant C to a T results in a sequence that is not associated with a disease, disorder, or condition. The target sequence may comprise an A→G point mutation associated with a disease, disorder, or condition, and wherein the conversion of the mutant G to a A results in a sequence that is not associated with a disease, disorder, or condition. In some embodiments, the target nucleic acid sequence encodes a protein, and the point mutation is in a codon and results in a change in the amino acid encoded by the mutant codon as compared to the wild-type codon. In some embodiments, the conversion of the mutant C (or mutant G) results in a change of the amino acid encoded by the mutant codon. In some embodiments, the conversion of the mutant C (or mutant G) results in the codon encoding the wild-type amino acid. In some embodiments, the contacting is in vivo in a subject. In some embodiments, the subject has or has been diagnosed with a disease, disorder, or condition.

[0359] In some embodiments, the disclosed cytosine base editors are used to introduce a point mutation into a nucleic acid by deaminating a target C nucleobase to a uracil nucleobase. In some embodiments, the deamination of the target C and substitution of the uracil intermediate to a thymine (T) nucleobase results in the correction of a genetic defect, e.g., in the correction of a point mutation that leads to a loss of function in a gene product. In some embodiments, the genetic defect is associated with a disease, disorder, or condition, e.g., a lysosomal storage disorder or a metabolic disease, such as, for example, type I diabetes. In some embodiments, the methods provided herein are used to introduce a deactivating point mutation into a gene or allele that encodes a gene product that is associated with a disease, disorder, or condition. For example, in some embodiments, methods are provided herein that employ a base editor to introduce a deactivating point mutation into an oncogene (e.g., in the treatment of a proliferative disease). A deactivating mutation may, in some embodiments, generate a premature stop codon in a coding sequence, which results in the expression of a truncated gene product, e.g., a truncated protein lacking the function of the full-length protein.

[0360] In some embodiments, the methods provided herein are intended to restore the function of a dysfunctional gene via genome editing. The base editors provided herein can be validated for gene editing-based human therapeutics in vitro, e.g., by correcting a disease-associated mutation in human cell culture. It will be understood by the skilled artisan that the base editors provided herein, e.g., the base editors comprising a nucleic acid programmable DNA binding protein (e.g., Cas9) and a nucleotide modification domain can be used to correct any single point T to G or A to C mutation. Deamination of a C that is base-paired with the mutant G, followed by a round of replication, may correct the mutation.

[0361] The successful correction of point mutations in disease-associated genes and alleles opens up new strategies for gene correction with applications in therapeutics and basic research. Site-specific single-base modification systems like the disclosed fusions of a nucleic acid programmable DNA binding protein and a cytidine deaminase domain also have applications in “reverse” gene therapy, where certain gene functions are purposely suppressed or abolished. In these cases, site-specifically mutating residues that lead to inactivating mutations in a protein, or mutations that inhibit function of the protein can be used to abolish or inhibit protein function.

### Methods of Treatment

[0362] The present disclosure provides methods for the treatment of a subject diagnosed with a disease associated with or caused by a point mutation that can be corrected by a base editor (e.g., a cytosine base editor) provided herein. For example, in some embodiments, a method is provided that comprises administering to a subject having such a disease, e.g., a cancer associated with a point mutation as described above, an effective amount of a base editor and a gRNA that forms a complex with the CBE, that corrects the point mutation or introduces a deactivating mutation into a disease-associated gene. In some embodiments, a method is provided that comprises administering to a subject having such a disease, e.g., a cancer associated with a point mutation as described above, an effective amount of a base editor-gRNA complex that corrects the point mutation or introduces a deactivating mutation into a disease-associated gene. Further provided herein are methods comprising administering to a subject one or more vectors that contains a nucleotide sequence that expresses the base editor and gRNA that forms a complex with the base editor.

[0363] In some embodiments, the disease is a proliferative disease. In some embodiments, the disease is a genetic disease. In some embodiments, the disease is a neoplastic disease. In some embodiments, the disease is a metabolic disease. Other diseases that can be treated by correcting a point mutation or introducing a deactivating mutation into a disease-associated gene will be known to those of skill in the art, and the disclosure is not limited in this respect.

[0364] The present disclosure provides methods for the treatment of additional diseases or disorders, e.g., diseases or disorders that are associated or caused by a point mutation that can be corrected by base editing. Some such diseases are described herein, and additional suitable diseases that can be treated with the strategies and CBEs provided herein will be apparent to those of skill in the art based on the present disclosure. Exemplary suitable diseases and disorders are listed below. It will be understood that the numbering of the specific positions or residues in the respective sequences depends on the particular protein and numbering scheme used. Numbering might be different, e.g., in precursors of a mature protein and the mature protein itself, and differences in sequences from species to species may affect numbering. One of skill in the art will be able to identify the respective residue in any homologous protein and in the respective encoding nucleic acid by methods well known in the art, e.g., by sequence alignment and determination of homologous residues. Exemplary suitable diseases and disorders include, without limitation: Non-Bruton type Agammaglobulinemia, Hypomyelinating Leukodystrophy, 21-hydroxylase deficiency, familial Breast-ovarian cancer, Immunodeficiency with basal ganglia calcification, Congenital myasthenic syndrome, Shprintzen-Goldberg syndrome, Peroxisome biogenesis disorder, Nephronophthisis, autosomal recessive early-onset, digenic, PINK1/DJ1 Parkinson disease, Cerebral visual impairment and intellectual disability, Neurodevelopmental disorder with or without anomalies of the brain, eye, or heart, Immunodeficiency, Leber congenital amaurosis, Amyotrophic lateral sclerosis type 10, Motor neuron disease, Malignant melanoma of skin, Focal cortical dysplasia type II, papillary Renal cell carcinoma, Glioblastoma, Colorectal Neoplasms, Uterine cervical neoplasms, sporadic Papillary renal cell carcinoma, Malignant neoplasm of body of uterus, Kidney Carcinoma, Neoplasm of the breast, Glioblastoma, Smith-Kingsmore syndrome, Homocysteinemia due to MTHFR deficiency, type 2A2A Charcot-Marie-Tooth disease, Bartter syndrome type 3, Cataract, multiple types, Gastrointestinal stroma tumor, Paragangliomas, Pheochromocytoma, Hereditary cancer-predisposing syndrome, Paragangliomas, Hereditary cancer-predisposing syndrome, Gastrointestinal stroma tumor, Paragangliomas, Pheochromocytoma, Hereditary Paraganglioma-Pheochromocytoma Syndromes, Hereditary cancer-predisposing syndrome, Gastrointestinal stroma tumor, Paraganglioma and gastric stromal sarcoma, Uncombable hair syndrome, Parkinson disease, autosomal recessive early-onset, Childhood hypophosphatasia, Odontohypophosphatasia, Takenouchi-Kosaki syndrome, C1q deficiency, Prostate cancer/brain cancer susceptibility, UDPglucose-4-epimerase deficiency, Deficiency of hydroxymethylglutaryl-CoA lyase, Fucosidosis, nonsyndromic cleft palate, Van der Woude syndrome, autosomal recessive Hypercholesterolemia, Eichsfeld type congenital muscular dystrophy, autosomal dominant Mental retardation, Hyperphosphatasia with mental retardation syndrome, Hyperphosphatasia-intellectual disability syndrome, Obesity, mild, early-onset, Ectodermal dysplasia, hypohidrotic/hair/tooth/nail type, Dystonia, torsion, autosomal recessive, Reticular dysgenesis, Erythrokeratodermia variabilis et progressiva, Corneal dystrophy, Fuchs endothelial, Corneal dystrophy, posterior polymorphous, Hereditary neutrophilia, Ceroid lipofuscinosis neuronal, Neuronal ceroid lipofuscinosis, Lethal tight skin contracture syndrome, DFNA 2 Nonsyndromic Hearing Loss, Osteogenesis imperfecta type 8, GLUT1 deficiency syndrome, autosomal recessive, Glucose transporter type 1 deficiency syndrome, Congenital amegakaryocytic thrombocytopenia, Myelofibrosis with myeloid metaplasia, somatic, Myelofibrosis with myeloid metaplasia, Thrombocythemia, somatic, Hematologic neoplasm, Early infantile epileptic encephalopathy, Mental retardation, autosomal recessive, Familial porphyria cutanea tarda, MYH-associated polyposis, Hereditary cancer-predisposing syndrome, MUTYH-associated polyposis, Hereditary cancer-predisposing syndrome, Methylmalonic acidemia with homocystinuria, Methylmalonic aciduria and homocystinuria, cblC type, digenic, Muscle eye brain disease, Congenital Muscular Dystrophy, alpha-dystroglycan related, Limb-Girdle Muscular Dystrophy, Recessive, Muscle eye brain disease, Congenital muscular dystrophy-dystroglycanopathy with brain and eye anomalies, type A3, Adenocarcinoma of the colon, Congenital primary aphakia, Hepatic failure, early-onset, and neurologic disorder due to cytochrome C oxidase deficiency, Carnitine palmitoyltransferase II deficiency, infantile, Carnitine palmitoyltransferase II deficiency, myopathic, stress-induced, Carnitine palmitoyltransferase II deficiency, Carnitine palmitoyltransferase II deficiency, myopathic, stress-induced, Sensorineural deafness with mild renal dysfunction, Bartter syndrome type 4, Hypercholesterolemia, autosomal dominant, Low density lipoprotein cholesterol level quantitative trait locus, Familial hypercholesterolemia, Hypocholesterolemia, Hypercholesterolemia, autosomal dominant, Familial hypercholesterolemia, Low density lipoprotein cholesterol level quantitative trait locus, Hypocholesterolemia, Lattice corneal dystrophy Type III, Epileptic encephalopathy, early infantile, Hypobetalipoproteinemia, familial, Congenital disorder of glycosylation type 1t, Leber congenital amaurosis, Retinitis pigmentosa, Medium-chain acyl-coenzyme A dehydrogenase deficiency, Dilated cardiomyopathy 1CC, Venous malformation, Aase syndrome, Stargardt disease, Cone-rod dystrophy, Retinitis pigmentosa, Stargardt disease, Congenital stationary night blindness, Retinal dystrophy, Nonsyndromic cleft lip with or without cleft palate, Glycogen storage disease type III, Glycogen storage disease IIIa, Intermediate maple syrup urine disease type 2, Maple syrup urine disease, Chorea, childhood-onset, with psychomotor retardation, Marshall syndrome, Stickler syndrome, type 2, Marshall/Stickler syndrome, Chudley-McCullough syndrome, Auriculocondylar syndrome, Pontocerebellar hypoplasia, type 9, Epileptic encephalopathy, early infantile, Spinocerebellar ataxia, Muscle AMP deaminase deficiency, Congenital giant melanocytic nevus, Liver cancer, Chronic lymphocytic leukemia, Neurocutaneous melanosis, Malignant melanoma of skin, Multiple myeloma, Neuroblastoma, Lung adenocarcinoma, Non-small cell lung cancer, Acute myeloid leukemia, Renal cell carcinoma, papillary, Neoplasm of brain, Cutaneous melanoma, Glioblastoma, Hepatocellular carcinoma, Transitional cell carcinoma of the bladder, Colorectal Neoplasms, Nasopharyngeal Neoplasms, Adrenocortical carcinoma, Adenocarcinoma of stomach, Ovarian Serous Cystadenocarcinoma, Malignant neoplasm of body of uterus, RAS Inhibitor response, Malignant lymphoma, non-Hodgkin, Medulloblastoma, Malignant melanoma of skin, Multiple myeloma, Acute myeloid leukemia, Myelodysplastic syndrome, Cutaneous melanoma, Transitional cell carcinoma of the bladder, Neoplasm, Colorectal Neoplasms, Adenocarcinoma of stomach, Cutaneous melanoma, Malignant melanoma of skin, Multiple myeloma, Acute myeloid leukemia, Noonan syndrome, Myelodysplastic syndrome, Cutaneous melanoma, Colorectal Neoplasms, Adenocarcinoma of stomach, Malignant neoplasm of body of uterus, Malignant melanoma of skin, Multiple myeloma, Non-small cell lung cancer, Acute myeloid leukemia, Myelodysplastic syndrome, Cutaneous melanoma, Colorectal Neoplasms, Adenocarcinoma of stomach, Malignant neoplasm of body of uterus, Secondary hypothyroidism, Cardiovascular phenotype, Neurodevelopmental disorder, mitochondrial, with abnormal movements and lactic acidosis, with or without seizures, beta-Hydroxysteroid dehydrogenase deficiency, Hajdu-Cheney syndrome, Hemochromatosis type 2A, Hemochromatosis type 1, Atrial fibrillation, familial, Nager syndrome, Severe congenital neutropenia, autosomal recessive, Retinitis pigmentosa, Neurodevelopmental disorder with microcephaly, hypotonia, and variable brain anomalies, Abnormality of brain morphology, Neurodevelopmental disorder with microcephaly, hypotonia, and variable brain anomalies, Paget disease of bone, White-sutton syndrome, Ichthyosis vulgaris, Dermatitis, atopic, Ichthyosis vulgaris, Mental retardation, autosomal dominant, Nemaline myopathy, Congenital myopathy with fiber type disproportion, Epilepsy, nocturnal frontal lobe, type 3, Aicardi-Goutieres syndrome, Gaucher disease, perinatal lethal, Gaucher's disease, type 1, Subacute neuronopathic Gaucher's disease, Pyruvate kinase deficiency of red cells, Mental retardation, autosomal dominant, myopathy, mitochondrial, and ataxia, Grange syndrome, Charcot-Marie-Tooth disease, type 2, Familial partial lipodystrophy, Hutchinson-Gilford progeria syndrome, childhood-onset, Charcot-Marie-Tooth disease, Charcot-Marie-Tooth disease, type 2, Familial partial lipodystrophy, Benign scapuloperoneal muscular dystrophy with cardiomyopathy, Mandibuloacral dysostosis, Dilated cardiomyopathy, Encephalopathy, progressive, early-onset, with brain edema and/or leukoencephalopathy, Infantile encephalopathy, Hereditary insensitivity to pain with anhidrosis, Familial medullary thyroid carcinoma, Hereditary insensitivity to pain with anhidrosis Spherocytosis, type 3, autosomal recessive, Spherocytosis, Recessive, Elliptocytosis, Hereditary pyropoikilocytosis, Elliptocytosis, Spherocytosis, Recessive, Enlarged vestibular aqueduct, Alternating hemiplegia of childhood, Autoimmune interstitial lung, joint, and kidney disease, Mitochondrial complex I deficiency, Charcot-Marie-Tooth disease, demyelinating, type 1b, Charcot-Marie-Tooth disease, type I, Roussy-Lévy syndrome, Neuropathy, congenital hypomyelinating, autosomal dominant, Charcot-Marie-Tooth disease, demyelinating, type 1b, Charcot-Marie-Tooth disease type 2J, Charcot-Marie-Tooth disease dominant intermediate, Charcot-Marie-Tooth disease, type I, Gastrointestinal stroma tumor, Paragangliomas, Hereditary cancer-predisposing syndrome, Achromatopsia, Thrombophilia due to activated protein C resistance, Geroderma osteodysplastica, Trimethylaminuria, FMO3 activity, decreased, Trimethylaminuria, Primary open angle glaucoma juvenile onset, Glaucoma, open angle, digenic, Glaucoma, primary congenital, digenic, MYOC-Related Disorders, Leukoencephalopathy with Brainstem and Spinal Cord Involvement and Lactate Elevation, Antithrombin III deficiency, Antithrombin deficiency, Antithrombin III deficiency, Hereditary nephrotic syndrome, Nephrotic syndrome, idiopathic, steroid-resistant, Pituitary hormone deficiency, combined, Glutamine deficiency, congenital, Prostate cancer, hereditary, Junctional epidermolysis bullosa gravis of Herlitz, Hyperparathyroidism, Factor H deficiency, Basal laminar drusen, CFHR5 deficiency, Factor XIII subunit B deficiency, Primary autosomal recessive microcephaly 5, Macular dystrophy, Leber congenital amaurosis, Retinitis pigmentosa, Leber congenital amaurosis, Macular dystrophy, Acute myeloid leukemia with maturation, Microcephaly, primary, autosomal recessive, Hypokalemic periodic paralysis, Left ventricular noncompaction, Familial hypertrophic cardiomyopathy, Left ventricular noncompaction, Familial restrictive cardiomyopathy, Cardiovascular phenotype, Renal dysplasia, Amelogenesis imperfecta, type IA, Popliteal pterygium syndrome, Van der Woude syndrome, Zimmermann-Laband syndrome, Leber congenital amaurosis, Stromme syndrome, Ciliary dyskinesia, primary, Usher syndrome, type 2A, Retinitis pigmentosa, Usher syndrome, Usher syndrome, type 2A, Retinal dystrophy, USH2A-Related Disorders, Usher syndrome, Blindness, Rod-cone dystrophy, Pigmentary retinopathy, Abnormal macular morphology, Retinal pigment epithelial atrophy, Loeys-Dietz syndrome, Holt-Oram syndrome, Cardiovascular phenotype, Martsolf syndrome, Warburg micro syndrome, Skraban-Deardorff syndrome, Coenzyme Q10 deficiency, primary, Multiple mitochondrial dysfunctions syndrome, Nemaline myopathy, Myopathy, scapulohumeroperoneal, Nemaline myopathy, autosomal dominant or recessive, Myopathy, actin, congenital, with cores, Cardioencephalomyopathy, fatal infantile, due to cytochrome c oxidase deficiency, Chédiak-Higashi syndrome, Familial hypertrophic cardiomyopathy, Methylcobalamin deficiency, cblG type, Catecholaminergic polymorphic ventricular tachycardia, Catecholaminergic polymorphic ventricular tachycardia type 1, Catecholaminergic polymorphic ventricular tachycardia, Tooth agenesis, selective, Multiple cutaneous leiomyomas, Fumarase deficiency, Hereditary cancer-predisposing syndrome, Mental retardation, autosomal dominant, Diamond-Blackfan anemia, Maturity-onset diabetes of the young, type 7, Myoglobinuria, acute recurrent, autosomal recessive, Feingold syndrome, Cranioectodermal dysplasia, Short rib polydactyly syndrome, Jeune thoracic dystrophy, Short-rib thoracic dysplasia without polydactyly, Short-rib thoracic dysplasia with polydactyly, digenic, Multiple epiphyseal dysplasia, Familial hypobetalipoproteinemia, Familial hypercholesterolemia, Hypercholesterolemia, autosomal dominant, type B, Hypobetalipoproteinemia, familial, Hypobetalipoproteinemia, familial, Proopiomelanocortin deficiency, Acute myeloid leukemia, Shashi-Pena syndrome, Primary pulmonary hypertension 4, Navajo neurohepatopathy, Retinitis pigmentosa, Retinitis pigmentosa, Neuroblastoma, Neuroblastoma, Lung adenocarcinoma, Neuroblastoma, Non-small cell lung cancer, Benign Soft Tissue Neoplasm of Uncertain Differentiation, 3-Oxo-5 alpha-steroid delta 4-dehydrogenase deficiency, Spastic paraplegia, autosomal dominant, Glaucoma, primary congenital, Gingival fibromatosis, Noonan syndrome, Noonan syndrome, Rasopathy, Noonan syndrome, Short-rib thoracic dysplasia with polydactyly, Sitosterolemia, Cystinuria, Holoprosencephaly, Single median maxillary incisor, Schizencephaly, Erythrocytosis, familial, Factor v and factor viii, combined deficiency of, Multiple gastrointestinal atresias, Lynch syndrome, Lynch syndrome, Hereditary cancer-predisposing syndrome, Lynch syndrome, Hereditary nonpolyposis colon cancer, Lynch syndrome, Hereditary cancer-predisposing syndrome, Hereditary nonpolyposis colon cancer, Lynch syndrome, Hereditary cancer-predisposing syndrome, Hereditary nonpolyposis colorectal cancer type 5, Lynch syndrome, Hereditary cancer-predisposing syndrome, Colorectal cancer, nonpolyposis, Hereditary nonpolyposis colon cancer, Leydig hypoplasia, type I, Leydig cell agenesis, Ovarian dysgenesis 1, Ovarian hyperstimulation syndrome, Combined oxidative phosphorylation deficiency, Intellectual developmental disorder with persistence of fetal hemoglobin, Bardet-Biedl syndrome, Multiple mitochondrial dysfunctions syndrome, Miyoshi muscular dystrophy, Limb-girdle muscular dystrophy, type 2B, Limb-girdle muscular dystrophy, type 2B, Miyoshi muscular dystrophy, Limb-girdle muscular dystrophy, type 2B, Dysferlinopathy, Limb-girdle muscular dystrophy, type 2B, Miyoshi muscular dystrophy, Limb-girdle muscular dystrophy, type 2B, Radiohumeral fusions with other skeletal and craniofacial anomalies, Sepiapterin reductase deficiency, Alstrom syndrome, Microcephaly-capillary malformation syndrome, Visceral myopathy, Chronic intestinal pseudoobstruction, Progressive external ophthalmoplegia with mitochondrial DNA deletions, autosomal recessive, Mitochondrial DNA-depletion syndrome, hepatocerebral, Congenital disorder of glycosylation type 2B, Vitamin k-dependent clotting factors, combined deficiency of, Surfactant metabolism dysfunction, pulmonary, Wolcott-Rallison dysplasia, Pheochromocytoma, Hereditary cancer-predisposing syndrome, Retinitis pigmentosa, Cone-rod dystrophy amelogenesis imperfecta, Cd8 deficiency, familial, Severe combined immunodeficiency, atypical, Achromatopsia, Monochromacy, Ectodermal dysplasia, hypohidrotic/hair/tooth type, autosomal dominant, Autosomal recessive hypohidrotic ectodermal dysplasia syndrome, Autosomal dominant hypohidrotic ectodermal dysplasia, Colorectal cancer with chromosomal instability, Retinitis pigmentosa, Osteomyelitis, sterile multifocal, with periostitis and pustulosis, Hypochromic microcytic anemia with iron overload, Culler-Jones syndrome, Autosomal recessive centronuclear myopathy, Thrombophilia, hereditary, due to protein C deficiency, autosomal dominant, Congenital disorders of glycosylation type II, Congenital disorder of glycosylation, type IIo, Warburg micro syndrome, Hypomyelination with brainstem and spinal cord involvement and leg spasticity, Warts, hypogammaglobulinemia, infections, and myelokathexis, Congenital NAD deficiency disorder, Vertebral, cardiac, renal, and limb defects syndrome, Mowat-Wilson syndrome, Homocystinuria, cblD type, variant 1, Nemaline myopathy, Nemaline myopathy, Idiopathic generalized epilepsy, Epilepsy, idiopathic generalized, Juvenile myoclonic epilepsy, Episodic ataxia, type 5, Progressive myositis ossificans, Amelogenesis imperfecta, type IH, Benign familial neonatal-infantile seizures, Early infantile epileptic encephalopathy, Episodic ataxia, Early infantile epileptic encephalopathy, Seizures, Vertigo, Benign familial neonatal-infantile seizures, Mental retardation, autosomal dominant, Tumoral calcinosis, familial, hyperphosphatemic, Short rib-polydactyly syndrome, Majewski type, Severe myoclonic epilepsy in infancy, Generalized epilepsy with febrile seizures plus, type 2, Severe myoclonic epilepsy in infancy, Seizures, Delayed speech and language development, Early infantile epileptic encephalopathy, Severe myoclonic epilepsy in infancy, Familial hemiplegic migraine type 3, Paroxysmal extreme pain disorder, Hereditary sensory and autonomic neuropathy type IIA, Generalized epilepsy with febrile seizures plus, type 7, Rolandic epilepsy, Small fiber neuropathy, Primary erythromelalgia, Hereditary sensory and autonomic neuropathy type IIA, Generalized epilepsy with febrile seizures plus, type 7, Inherited Erythromelalgia, Primary erythromelalgia, Indifference to pain, congenital, autosomal recessive, Febrile seizures, familial, 3b, Benign recurrent intrahepatic cholestasis, Progressive familial intrahepatic cholestasis, Myasthenic syndrome, slow-channel congenital, Lethal multiple pterygium syndrome, Duane syndrome type 2, Synpolydactyly, Brachydactyly-syndactyly-oligodactyly syndrome, Brachydactyl-syndactyly-oligodactyly syndrome (1 patient), immunodeficiency, developmental delay, and hypohomocysteinemia, Hereditary myopathy with early respiratory failure, Familial dilated cardiomyopathy, Dilated cardiomyopathy, Primary dilated cardiomyopathy, Limb-girdle muscular dystrophy, type 2J, Primary dilated cardiomyopathy, Familial dilated cardiomyopathy, Familial hypertrophic cardiomyopathy, Diabetes mellitus type 2, Ehlers-Danlos syndrome, type 4, Cardiovascular phenotype, Ehlers-Danlos syndrome, type 2, Ehlers-Danlos syndrome, classic type, Hemochromatosis type 4, Immunodeficiency, Mycobacterial and viral infections, susceptibility to, autosomal recessive, Immunodeficiency, Mental retardation, autosomal recessive, Acute myeloid leukemia, Myelodysplastic syndrome, Myelodysplastic syndrome progressed to acute myeloid leukemia, Mitochondrial complex I deficiency, Joubert syndrome, Infantile-onset ascending hereditary spastic paralysis, ALS2-Related Disorders, Amyotrophic lateral sclerosis type 2, Pulmonary venoocclusive disease, Primary pulmonary hypertension, Autoimmune lymphoproliferatiVe syndrome, type V, Aculeiform cataract, Congenital cataract, Cataract, coppock-like, Liver cancer, Medulloblastoma, Malignant melanoma of skin, Multiple myeloma, Lung adenocarcinoma, Acute myeloid leukemia, Myelodysplastic syndrome, Neoplasm of brain, Neoplasm of the breast, Glioblastoma, Hepatocellular carcinoma, Transitional cell carcinoma of the bladder, Brainstem glioma, Colorectal Neoplasms, Adenoid cystic carcinoma, Adenocarcinoma of prostate, Hypotonia, infantile, with psychomotor retardation and characteristic facies, Congenital hyperammonemia, type I, Hereditary cancer-predisposing syndrome, Familial cancer of breast, Hereditary cancer-predisposing syndrome, Hereditary cancer-predisposing syndrome, Spondylometaphyseal dysplasia—Sutcliffe type, Spondylometaphyseal dysplasia, Short stature, Focal segmental glomerulosclerosis, Microcephaly, Small for gestational age, Disproportionate short-trunk short stature, Decreased body weight, Atrioventricular canal defect, Congenital microcephaly, Steroid-resistant nephrotic syndrome, Schimke immunoosseous dysplasia, Short stature, Focal segmental glomerulosclerosis, Microcephaly, Small for gestational age, Disproportionate short-trunk short stature, Decreased body weight, Atrioventricular canal defect, Congenital microcephaly, Steroid-resistant nephrotic syndrome, Gracile syndrome, Cholestanol storage disease, Odontoonychodermal dysplasia, Schopf-Schulz-Passarge syndrome, Tooth agenesis, selective, Type A1 brachydactyly, Dyschromatosis universalis hereditaria, Charcot-Marie-Tooth disease, axonal, type 2T, Myopathy, centronuclear, Three M syndrome, Waardenburg syndrome type 1, Alport syndrome, autosomal recessive, Benign familial hematuria, Basal ganglia disease, biotin-responsive, ARMC9-related Joubert syndrome, ARMC9-related Joubert syndrome, Jourbert syndrome, Arthrogryposis, distal, type 5d, Microphthalmia, isolated, Myasthenic syndrome, congenital, fast-channel, Congenital myasthenic syndrome, fast-channel, Oguchi's disease, Crigler Najjar syndrome, type 1, Crigler-Najjar syndrome, type II, Crigler-Najjar syndrome, Crigler-Najjar syndrome, type II, Gilbert's syndrome, Crigler Najjar syndrome, type 1, Hyperbilirubinemia, Ullrich congenital muscular dystrophy, Bethlem myopathy, Ullrich congenital muscular dystrophy, Bethlem myopathy, Primary hyperoxaluria, type I, D-2-hydroxyglutaric aciduria, Sideroblastic anemia with B-cell immunodeficiency, periodic fevers, and developmental delay, Multiple sulfatase deficiency, Gillespie syndrome, Limb-girdle muscular dystrophy, type 1C, Rippling muscle disease, Familial partial lipodystrophy, Severe congenital neutropenia, autosomal recessive, Severe congenital neutropenia, Von Hippel-Lindau syndrome, Hereditary cancer-predisposing syndrome, Erythrocytosis, familial, Von Hippel-Lindau syndrome, Erythrocytosis, familial, Von Hippel-Lindau syndrome, Renal cell carcinoma, papillary, Metabolic syndrome, susceptibility to, Obesity, age at onset of, Morbid obesity, Noonan syndrome, Rasopathy, Xeroderma pigmentosum, group C, Endplate acetylcholinesterase deficiency, Biotinidase deficiency, Thyroid hormone resistance, generalized, autosomal dominant, Thyroid hormone resistance, selective pituitary, Microphthalmia, syndromic, Congenital disorder of deglycosylation, Cardiovascular phenotype, Loeys-Dietz syndrome, Thoracic aortic aneurysm and aortic dissection, Congenital disorder of glycosylation type 1×, Mucopolysaccharidosis, MPS-IV-B, Osteogenesis imperfecta type 7, Lynch syndrome I, Hereditary cancer-predisposing syndrome, Turcot syndrome, Hereditary nonpolyposis colon cancer, Atrial fibrillation, Atrial fibrillation, familial, Atrial fibrillation, Brugada syndrome, Congenital long QT syndrome, Cardiac arrhythmia, Sudden infant death syndrome, Long qt syndrome, acquired, susceptibility to, Long QT syndrome, Romano-Ward syndrome, Brugada syndrome, Sick sinus syndrome, Progressive familial heart block, Cardiovascular phenotype, Paroxysmal familial ventricular fibrillation, Dilated Cardiomyopathy, Dominant, Long QT syndrome, Congenital long QT syndrome, Cardiac conduction defect, nonprogressive, Cardiac conduction defect, nonspecific, Brugada syndrome, Asplenia, isolated congenital, Liver cancer, Medulloblastoma, Malignant melanoma of skin, Pilomatrixoma, Hepatoblastoma, Hepatocellular carcinoma, Transitional cell carcinoma of the bladder, Uterine cervical neoplasms, Craniopharyngioma, Adenocarcinoma of stomach, Malignant neoplasm of body of uterus, Adenocarcinoma of prostate, Liver cancer, Medulloblastoma, Malignant melanoma of skin, Pilomatrixoma, Lung adenocarcinoma, Carcinoma of colon, Endometrial neoplasm, Hepatocellular carcinoma, Pancreatic adenocarcinoma, Transitional cell carcinoma of the bladder, Carcinoma of esophagus, Colorectal Neoplasms, Adenocarcinoma of stomach, Malignant neoplasm of body of uterus, Adenocarcinoma of prostate, Liver cancer, Medulloblastoma, Malignant melanoma of skin, Squamous cell carcinoma of the head and neck, Malignant tumor of prostate, Lung adenocarcinoma, Hepatoblastoma, Cutaneous melanoma, Hepatocellular carcinoma, Craniopharyngioma, Adrenocortical carcinoma, Adenocarcinoma of stomach, Malignant neoplasm of body of uterus, Liver cancer, Medulloblastoma, Lung adenocarcinoma, Neoplasm of stomach, Cutaneous melanoma, Hepatocellular carcinoma, Transitional cell carcinoma of the bladder, Carcinoma of esophagus, Uterine cervical neoplasms, Adenocarcinoma of stomach, Malignant neoplasm of body of uterus, Adenocarcinoma of prostate, Liver cancer, Malignant melanoma of skin, Lung adenocarcinoma, Cutaneous melanoma, Hepatocellular carcinoma, Transitional cell carcinoma of the bladder, Colorectal Neoplasms, Adrenocortical carcinoma, Malignant neoplasm of body of uterus, Adenocarcinoma of prostate, Nemaline myopathy, Spinocerebellar ataxia, autosomal recessive, Perrault syndrome, Hydrops, lactic acidosis, and sideroblastic anemia, Perrault syndrome, Bardet-Biedl syndrome, Bardet-Biedl syndrome, Failure of tooth eruption, primary, Gray platelet syndrome, Pretibial epidermolysis bullosa, Epidermolysis bullosa pruriginosa, autosomal dominant, Recessive dystrophic epidermolysis bullosa, Microcephaly, progressive, with seizures and cerebral and cerebellar atrophy, Epileptic encephalopathy, Nephrotic syndrome, type 5, with or without ocular abnormalities, Muscular dystrophy-dystroglycanopathy (congenital with brain and eye anomalies), type a, Tumor susceptibility linked to germline BAP1 mutations, Dilated cardiomyopathy 1Z, Dilated cardiomyopathy 1S, Familial hypertrophic cardiomyopathy, Cardiovascular phenotype, Familial hypertrophic cardiomyopathy, Hypogonadotropic hypogonadism with anosmia, Atelosteogenesis type 1, Atelosteogenesis type 3, Spondylocarpotarsal synostosis syndrome, Nemaline myopathy, Mental retardation with language impairment and with or without autistic features, Glycogen storage disease, type IV, Glycogen storage disease IV, congenital neuromuscular, Glycogen storage disease, type IV, Frontotemporal Dementia, Chromosome 3-Linked, Amyotrophic lateral sclerosis, Pituitary hormone deficiency, combined 1, Joubert syndrome, Neuropathy, hereditary motor and sensory, Okinawa type, Macular dystrophy, vitelliform, Retinitis pigmentosa, Combined oxidative phosphorylation deficiency, Spermatogenic failure, epileptic encephalopathy, infantile or early childhood, Alkaptonuria, Senior-Loken syndrome, Leber congenital amaurosis, Nephronophthisis, congenital deafness, Hypocalciuric hypercalcemia, familial, type 1, Neonatal severe hyperparathyroidism, Hypocalcemia, autosomal dominant, Hypocalciuric hypercalcemia, familial, type 1, Neonatal severe hyperparathyroidism, Hypocalciuric hypercalcemia, familial, type 1, Hypocalcemia, autosomal dominant, Hypocalcemia, autosomal dominant, with bartter syndrome, Dyskinesia, familial, with facial myokymia, Visceral myopathy, Lymphedema, primary, with myelodysplasia, Dendritic cell, monocyte, B lymphocyte, and natural killer lymphocyte deficiency, Acyl-CoA dehydrogenase family, member, deficiency of, Retinitis pigmentosa, Retinitis pigmentosa, autosomal recessive, Congenital stationary night blindness, autosomal dominant, Familial benign pemphigus, Epileptic encephalopathy, early infantile, Adolescent nephronophthisis, Primary hypertrophic osteoarthropathy, autosomal recessive, Myopathy, myofibrillar, Propionyl-CoA carboxylase deficiency, Blepharophimosis, ptosis, and epicanthus inversus, Seckel syndrome, Bruck syndrome, Craniosynostosis, Deficiency of ferroxidase, Usher syndrome, type 3A, Usher syndrome, type 3A, Retinitis pigmentosam, Deficiency of butyrylcholine esterase, BCHE, fluoride, Retinitis pigmentosa, Fanconi-Bickel syndrome, Short stature, idiopathic, autosomal, Liver cancer, Malignant melanoma of skin, Squamous cell carcinoma of the head and neck, Small cell lung cancer, Lung adenocarcinoma, Squamous cell lung carcinoma, Renal cell carcinoma, papillary, Neoplasm of brain, Neoplasm of the breast, Glioblastoma, Hepatocellular carcinoma, Pancreatic adenocarcinoma, Transitional cell carcinoma of the bladder, Brainstem glioma, Carcinoma of esophagus, PIK3CA related overgrowth spectrum, Colorectal Neoplasms, Uterine cervical neoplasms, Papillary renal cell carcinoma, sporadic, Nasopharyngeal Neoplasms, Adenocarcinoma of stomach, Ovarian Serous Cystadenocarcinoma, Malignant neoplasm of body of uterus, Adenocarcinoma of prostate, Uterine Carcinosarcoma, Carcinoma of gallbladder, Lung cancer, Medulloblastoma, Malignant melanoma of skin, Squamous cell carcinoma of the head and neck, Malignant tumor of prostate, Ovarian epithelial cancer, Carcinoma of colon, Neoplasm of brain, Neoplasm of the breast, Glioblastoma, Transitional cell carcinoma of the bladder, PIK3CA related overgrowth spectrum, Ovarian Neoplasms, Colorectal Neoplasms, Uterine cervical neoplasms, Adenocarcinoma of stomach, Malignant neoplasm of body of uterus, Adenocarcinoma of prostate, Uterine Carcinosarcoma, Cowden syndrome, PIK3CA related overgrowth spectrum, Colorectal Neoplasms, Ciliary dyskinesia, Ciliary dyskinesia, primary, Microphthalmia syndromic, Methylcrotonyl-CoA carboxylase deficiency, Epidermolysis bullosa simplex, Koebner type, Epidermolysis bullosa simplex, generalized, with scarring and hair loss, Leukoencephalopathy with vanishing white matter, Congenital disorder of glycosylation type 1D, Woolly hair, autosomal recessive, with or without hypotrichosis, Membranous cataract, Myopia, high, with cataract and vitreoretinal degeneration, Primary hypomagnesemia, Dominant hereditary optic atrophy, Autosomal dominant optic atrophy plus syndrome, Dominant hereditary optic atrophy, Abortive cerebellar ataxia, Dominant hereditary optic atrophy, Retinitis pigmentosa, Retinal dystrophy, Congenital stationary night blindness, autosomal dominant, Retinitis pigmentosa, Retinitis pigmentosa, Epileptic encephalopathy, early infantile, Abnormality of brain morphology, Dysostosis multiplex, Mucopolysaccharidosis type I, Hypochondroplasia, Thanatophoric dysplasia type 1, Epidermal nevus, Bladder carcinoma, Achondroplasia, Crouzon syndrome with acanthosis nigricans, Craniosynostosis, Carcinoma, Thanatophoric dysplasia type 1, Achondroplasia, Hypochondroplasia, Craniosynostosis, Camptodactyly, tall stature, and hearing loss syndrome, Hypochondroplasia, Thanatophoric dysplasia type 1, Craniosynostosis, Fibrous dysplasia of jaw, Myasthenia, limb-girdle, familial, Selective tooth agenesis, Orofacial cleft, Hypoplastic enamel-onycholysis-hypohidrosis syndrome, Jeune thoracic dystrophy, Ellis-van Creveld Syndrome, Short rib-polydactyly syndrome, Majewski type, Chondroectodermal dysplasia, Short rib-polydactyly syndrome, Majewski type, Diabetes mellitus type 2, Diabetes mellitus and insipidus with optic atrophy and deafness, Wolfram syndrome, Joubert syndrome, Coach syndrome, Retinitis pigmentosa, Cone-rod dystrophy, Retinal dystrophy, Spastic paraplegia, autosomal recessive, Epileptic encephalopathy, early infantile, Retinitis pigmentosa, Limb-girdle muscular dystrophy, type 2E, Gastrointestinal stroma tumor, Gastrointestinal stromal tumor, familial, Cutaneous mastocytosis, Gastrointestinal stroma tumor, Cutaneous melanoma, Gastrointestinal stroma tumor, Acute myeloid leukemia, Hematologic neoplasm, Cutaneous melanoma, Congenital disorder of glycosylation type 1Q, Hypogonadotropic hypogonadism with or without anosmia, Epilepsy, progressive myoclonic, with or without renal failure, Cryptophthalmos syndrome, Hyaline fibromatosis syndrome, Deafness, autosomal dominant nonsyndromic sensorineural, with dentinogenesis imperfecta, Dentinogenesis imperfecta—Shield's type II, Dentinogenesis imperfecta—Shield's type III, Deafness, autosomal dominant nonsyndromic sensorineural, with dentinogenesis imperfecta, Basan syndrome, Adermatoglyphia, Type A2 brachydactyly, Acromesomelic dysplasia, Demirhan type, Fibular hypoplasia and complex brachydactyly, Brachydactyly, type al, Abetalipoproteinaemia, SLC39A8 deficiency, congenital disorder of glycosylation, type IIn, Beta-D-mannosidosis, Sudden cardiac failure, infantile, Deficiency of 3-hydroxyacyl-CoA dehydrogenase, Hyperinsulinemic hypoglycemia, familial, Fibrosis of extraocular muscles, congenital, Cardiac arrhythmia, Cardiac arrhythmia, ankyrin B-related, Long QT syndrome, Cardiovascular phenotype, Cardiac arrhythmia, Cardiac arrhythmia, ankyrin B-related, Long QT syndrome, Arrhythmia, Cardiovascular phenotype, Bardet-Biedl syndrome, Van Maldergem syndrome, short-rib thoracic dysplasia with polydactyly, Ceroid lipofuscinosis neuronal, Macular dystrophy with central cone involvement, Ceroid lipofuscinosis neuronal, Methylmalonic aciduria cb1A type, Pseudohypoaldosteronism type 1 autosomal dominant, Pseudohypoaldosteronism, Common variable immunodeficiency, with autoimmunity, Afibrinogenemia, congenital, Familial visceral amyloidosis, Ostertag type, Hypodysfibrinogenemia, congenital, Afibrinogenemia, congenital, Glutaric acidemia IIC, Glutaric aciduria, type 2, Short rib-polydactyly syndrome, Majewski type, Dilated cardiomyopathy 1A, Limb-girdle muscular dystrophy, type 2S, Mitochondrial myopathy, Myopia, Mitochondrial DNA depletion syndrome (cardiomyopathic type), autosomal recessive, Progressive sensorineural hearing impairment, Hypertrophic cardiomyopathy, Left ventricular hypertrophy, Vertigo, Abnormality of mitochondrial metabolism, Mitochondrial respiratory chain defects, Bietti crystalline corneoretinal dystrophy, Corneal Dystrophy, Recessive, Bietti crystalline corneoretinal dystrophy, Hereditary factor XI deficiency disease, Mitochondrial complex II deficiency, Paragangliomas, Hereditary cancer-predisposing syndrome, Mitochondrial complex II deficiency, Dyskeratosis congenita autosomal dominant, Ciliary dyskinesia, Mental retardation, autosomal dominant, Chondrocalcinosis, Oculocutaneous albinism type 4, Inherited bone marrow failure syndrome, Bone marrow failure syndrome, Cornelia de Lange syndrome, Joubert syndrome, Orofaciodigital syndrome, Complement component deficiency, C7 and C6 deficiency, combined subtotal, Succinyl-CoA acetoacetate transferase deficiency, Laron syndrome with undetectable serum GH-binding protein, Laron-type isolated somatotropin defect, Levy-Hollister syndrome, Molybdenum cofactor deficiency, complementation group B, Distal hereditary motor neuronopathy type 2C, Kartagener syndrome, Acrodysostosis, with or without hormone resistance, UV-sensitive syndrome, Cockayne syndrome type A, Retinitis pigmentosa with or without skeletal anomalies, Immunodeficiency, Kugelberg-Welander disease, Werdnig-Hoffmann disease, 3-methylcrotonyl CoA carboxylase deficiency, Striatal degeneration, autosomal dominant, Hermansky Pudlak syndrome, Mucopolysaccharidosis, type vi, intermediate, Short stature, microcephaly, and endocrine dysfunction, Wagner syndrome, Basal cell carcinoma, somatic, Capillary malformation-arteriovenous malformation, Usher syndrome, type 2C, Febrile seizures, familial, Bosch-Boonstra-Schaaf optic atrophy syndrome, Proprotein convertase deficiency, Familial adenomatous polyposis, Familial colorectal cancer, Familial adenomatous polyposis, Familial adenomatous polyposis, Hereditary cancer-predisposing syndrome, Familial adenomatous polyposis, Colorectal cancer, susceptibility to, Familial adenomatous polyposis, Hereditary cancer-predisposing syndrome, Familial adenomatous polyposis, Hereditary cancer-predisposing syndrome, Familial adenomatous polyposis, Hereditary cancer-predisposing syndrome, Familial adenomatous polyposis, Anencephalus, Aortic aneurysm, familial thoracic, Pyridoxine-dependent epilepsy, Seizures, Ventriculomegaly, Pyridoxine-dependent epilepsy, Myopathy, areflexia, respiratory distress, and dysphagia, early-onset, Congenital contractural arachnodactyly, Neuromyotonia and axonal neuropathy, autosomal recessive, Renal carnitine transport defect, Hereditary cancer-predisposing syndrome, Chylomicron retention disease, Groenouw corneal dystrophy type I, Reis-Bucklers' corneal dystrophy, Lattice corneal dystrophy type 3A, Lattice corneal dystrophy Type I, Pseudohypoaldosteronism, type 2, Pseudohypoaldosteronism type 2D, Myotilinopathy, Charcot-Marie-Tooth disease, axonal, type 2w, Leber congenital amaurosis, Retinitis pigmentosa, Diastrophic dysplasia, de la Chapelle dysplasia, Achondrogenesis, type IB, Multiple epiphyseal dysplasia, Diastrophic dysplasia, Hereditary diffuse leukoencephalopathy with spheroids, Infantile myofibromatosis, Mental retardation, autosomal recessive, Tay-Sachs disease, variant AB, Hyperglycinuria, Iminoglycinuria, digenic, Hyperekplexia hereditary, epileptic encephalopathy, early infantile, Autosomal recessive congenital ichthyosis, Congenital ichthyosiform erythroderma, Epilepsy, childhood absence, Familial febrile seizures, Leukodystrophy, hypomyelinating, Atrial septal defect with or without atrioventricular conduction defects, Ventricular septal defect, Primary dilated cardiomyopathy, Atrial septal defect, Ventricular fibrillation, Noncompaction cardiomyopathy, Abnormality of cardiovascular system morphology, Malformation of the heart and great vessels, Cardiovascular phenotype, Congenital heart disease, Atrial septal defect with or without atrioventricular conduction defects, Hypothyroidism, congenital, nongoitrous, Cardiovascular phenotype, Congenital heart disease, Craniosynostosis, Lewy body dementia, Sotos syndrome, Hypercalcemia, infantile, Hereditary angioneurotic edema with normal C1 esterase inhibitor activity, Hereditary angioneurotic edema, Acute myeloid leukemia, Myelodysplasia, Ehlers-Danlos syndrome progeroid type, Axenfeld-Rieger syndrome type 3, Polymicrogyria, asymmetric, Combined oxidative phosphorylation deficiency, Combined oxidative phosphorylation deficiency, Factor XIII subunit A deficiency, Cardiovascular phenotype, Bicuspid aortic valve, Arrhythmia, Sudden cardiac death, Ventricular fibrillation, Aortic dilatation, Bicuspid aortic valve, Branchiooculofacial syndrome, Hypoparathyroidism familial isolated, Auriculocondylar syndrome, Lafora disease, Hemochromatosis type 1, Transient neonatal diabetes mellitus, Michelin-tire baby, Combined oxidative phosphorylation deficiency, Peeling skin syndrome, Thrombocytopenia, anemia, and myelofibrosis, Premature ovarian failure, Sialidosis type I, 21-hydroxylase deficiency, Adenoma, cortisol-producing, Carcinoma, adrenocortical, androgen-secreting, Nakajo syndrome, Otospondylomegaepiphyseal dysplasia, Nonsyndromic Deafness, Mental retardation, autosomal dominant, Leber congenital amaurosis, Polycystic lipomembranous osteodysplasia with sclerosing leukoencephalopathy, Macular dystrophy, vitelliform, adult-onset, Retinitis pigmentosa, Choroidal dystrophy, central areolar, Glycine N-methyltransferase deficiency, Heimler syndrome, Three M syndrome, Xeroderma pigmentosum, variant type, Jaberi-Elahi syndrome, Ciliary dyskinesia, Platelet-activating factor acetylhydrolase deficiency, Methylmalonic aciduria due to methylmalonyl-CoA mutase deficiency, methylmalonic aciduria, mut(−) type, Methylmalonic aciduria due to methylmalonyl-CoA mutase deficiency, methylmalonic aciduria, mut(0) type, Methylmalonic acidemia, Methylmalonic aciduria due to methylmalonyl-CoA mutase deficiency, methylmalonic aciduria, mut(−) type Rh-null, regulator type, Rh-mod syndrome, Char syndrome, Autosomal recessive polycystic kidney disease, Polycystic kidney dysplasia, Autosomal recessive polycystic kidney disease, Spinocerebellar ataxia, Retinitis pigmentosa, Retinitis pigmentosa, mental retardation, autosomal dominant, Hydatidiform mole, recurrent, Deafness, autosomal dominant, Macular dystrophy, vitelliform, developmental delay, intellectual disability, obesity, and dysmorphic features, Leber congenital amaurosis, Maple syrup urine disease, Immunodeficiency, Hyper-IgE syndrome, Calcification of joints and arteries, Spinocerebellar ataxia, autosomal recessive, Forney Robinson Pascoe syndrome, Mitochondrial DNA depletion syndrome (encephalomyopathic type), North Carolina macular dystrophy, Spastic paraplegia and psychomotor retardation with or without seizures, Osteopetrosis, autosomal recessive, Amyotrophic lateral sclerosis type, Progressive pseudorheumatoid dysplasia, Metaphyseal chondrodysplasia, Schmid type, Ovarian dysgenesis, Alopecia congenita keratosis palmoplantaris, Oculodentodigital dysplasia, Merosin deficient congenital muscular dystrophy, Laminin alpha 2-related dystrophy, Merosin deficient congenital muscular dystrophy, Arginase deficiency, Arterial calcification of infancy, Hypophosphatemic rickets, autosomal recessive, Arterial calcification of infancy, Hypophosphatemic Rickets, Recessive, Arterial calcification of infancy, Joubert syndrome, Leber congenital amaurosis, Disseminated atypical mycobacterial infection, neurodegeneration with brain iron accumulation, Mental retardation, autosomal dominant, Congenital heart defects, multiple types, Mitochondrial diseases, Combined oxidative phosphorylation deficiency, Mitochondrial diseases, Estrogen resistance, Neoplasm of the breast, Spinocerebellar ataxia, autosomal recessive, Liver cancer, Hepatocellular carcinoma, Plasminogen deficiency, type I, Dysplasminogenemia, Plasminogen deficiency, type I, Parkinson disease, Dentin dysplasia, type I, with extreme microdontia and misshapen teeth, Ciliary dyskinesia, Spondylocostal dysostosis, Baraitser-Winter syndrome, Hereditary cancer-predisposing syndrome, Hereditary nonpolyposis colon cancer, Lynch syndrome, Neurodevelopmental abnormality, leukodystrophy, hypomyelinating, Congenital muscular dystrophy-dystroglycanopathy with brain and eye anomalies, type A7, Congenital muscular dystrophy-dystroglycanopathy with brain and eye anomalies, type A7, Muscular dystrophy-dystroglycanopathy (limb-girdle), type c, Congenital muscular dystrophy-dystroglycanopathy with brain and eye anomalies, type A7, Saethre-Chotzen syndrome, Ciliary dyskinesia, primary, Hypomyelination and Congenital Cataract, microtia without hearing impairment, Microtia, hearing impairment, and cleft palate, Isolated growth hormone deficiency type 1B, Uridine 5-prime monophosphate hydrolase deficiency, hemolytic anemia due to, Bardet-Biedl syndrome, Focal segmental glomerulosclerosis, Wilms tumor and radial bilateral aplasia, Pallister-Hall syndrome, Greig cephalopolysyndactyly syndrome, Pallister-Hall syndrome, Pallister-Hall syndrome, Hyperbiliverdinemia, Ehlers-Danlos syndrome, classic-like, Permanent neonatal diabetes mellitus, Maturity-onset diabetes of the young, type 2, Immunodeficiency, common variable, Cowden syndrome, Lung adenocarcinoma, Non-small cell lung cancer, Nonsmall cell lung cancer, response to tyrosine kinase inhibitor in, somatic, Glioblastoma, Non-small cell lung cancer, Squamous cell lung carcinoma, Carcinoma of esophagus, Non-small cell lung cancer, Mucopolysaccharidosis type VII, Argininosuccinate lyase deficiency, Epilepsy, progressive myoclonic, Shwachman syndrome, Disordered steroidogenesis due to cytochrome p450 oxidoreductase deficiency, Charcot-Marie-Tooth disease, Charcot-Marie-Tooth disease type 2F, Cholestasis, intrahepatic, of pregnancy, Progressive familial intrahepatic cholestasis, Progressive familial intrahepatic cholestasis, Intrahepatic cholestasis, Colchicine resistance, Cerebral cavernous malformation, Cerebral cavernous malformation, Cerebral cavernous malformations, Zellweger syndrome, Deafness enamel hypoplasia nail defects, Myelocerebellar disorder, COL1A2-Related Disorder, Ehlers-Danlos syndrome, classic type, Osteogenesis imperfecta type I, Osteogenesis imperfecta type III, Osteogenesis imperfecta type I, Osteogenesis imperfecta, recessive perinatal lethal, Ehlers-Danlos syndrome, classic type, Osteogenesis imperfecta type I, Osteogenesis imperfecta with normal sclerae, dominant form, Osteogenesis imperfecta type III, Osteogenesis imperfecta with normal sclerae, dominant form, Osteogenesis imperfecta type III, Ehlers-Danlos syndrome, autosomal recessive, cardiac valvular form, Neonatal intrahepatic cholestasis caused by citrin deficiency, Citrullinemia type II, Split-hand/foot malformation, Asparagine synthetase deficiency, Epilepsy, familial temporal lobe, Lissencephaly, Epilepsy, familial temporal lobe, Rolandic epilepsy, Epilepsy, familial temporal lobe, Enlarged vestibular aqueduct, Pendred's syndrome, Pendred's syndrome, Enlarged vestibular aqueduct, Pendred's syndrome, SLC26A4-Related Disorders, Enlarged vestibular aqueduct, Pendred's syndrome, Enlarged vestibular aqueduct, Congenital secretory diarrhea, chloride type, Maple syrup urine disease, type 3, DLD-Related Disorders, Lissencephaly, Lipodystrophy, congenital generalized, type 3, Renal cell carcinoma, papillary, Cystic fibrosis, Hereditary pancreatitis, Cystic fibrosis, Hereditary pancreatitis, ataluren response—Efficacy, Persistent hyperplastic primary vitreous, autosomal recessive, Atrophia bulborum hereditaria, Exudative vitreoretinopathy, Leptin dysfunction, Myofibrillar myopathy, filamin C-related, Myopathy, distal, Cardiomyopathy, familial hypertrophic, Dilated Cardiomyopathy, Dominant, Dilated Cardiomyopathy, Dominant, Basal cell carcinoma, somatic, Ghosal hematodiaphyseal syndrome, Multiple myeloma, Lung adenocarcinoma, Rasopathy, Glioblastoma, Transitional cell carcinoma of the bladder, Cardio-facio-cutaneous syndrome, Malignant melanoma of skin, Multiple myeloma, Lung adenocarcinoma, Non-small cell lung cancer, Squamous cell lung carcinoma, Squamous cell carcinoma of the skin, Transitional cell carcinoma of the bladder, Neoplasm, Colorectal Neoplasms, Adenocarcinoma of prostate, Lung cancer, Malignant melanoma of skin, Multiple myeloma, Squamous cell carcinoma of the head and neck, Lung adenocarcinoma, Non-small cell lung cancer, Squamous cell lung carcinoma, Colorectal Neoplasms, Non-small cell lung cancer, Rasopathy, Neoplasm of the breast, Neoplasm, Carcinoma of colon, Noonan syndrome, Cataract and cardiomyopathy, Myotonia congenital, Congenital myotonia, autosomal recessive form, Premature ovarian failure, Cortical dysplasia-focal epilepsy syndrome, Rolandic epilepsy, Pitt-Hopkins-like syndrome, Rolandic epilepsy, Long QT syndrome, Congenital long QT syndrome, Short QT syndrome, Cardiovascular phenotype, Long QT syndrome, Glaucoma, open angle, F, Glycogen storage disease of heart, lethal congenital, Familial hypertrophic cardiomyopathy, Primary familial hypertrophic cardiomyopathy, Holoprosencephaly, Currarino triad, Limb-girdle muscular dystrophy, type 1E, Neuronal ceroid lipofuscinosis, Maturity-onset diabetes of the young, type 11, Congenital heart disease, Atrial septal defect, Congenital heart disease, Atrial septal defect, Tetralogy of Fallot, Ventricular septal defect, Atrioventricular septal defect, Idiopathic transverse myelitis, Jankovic Rivera syndrome, Farber disease, Hyperlipoproteinemia, type I, Hyperlipoproteinemia, type I, lipoprotein lipase (Olbia), Surfactant metabolism dysfunction, pulmonary, Osteogenesis imperfecta, type xiii, Hypermanganesemia with dystonia, Charcot-Marie-Tooth disease, demyelinating, type 1f, Charcot-Marie-Tooth disease type 2E, Charcot-Marie-Tooth disease, demyelinating, type 1f, Trichothiodystrophy 6, nonphotosensitive, Cholesterol monooxygenase (side-chain cleaving) deficiency, Kallmann syndrome, Hartsfield syndrome, Medulloblastoma, Neuroblastoma, Encephalocraniocutaneous lipomatosis, Astrocytoma, Brainstem glioma, Adenocarcinoma of stomach, Rosette-forming glioneuronal tumor, Hypogonadotropic hypogonadism with anosmia, Spherocytosis type 1, Mental retardation, autosomal dominant, Idiopathic basal ganglia calcification, Basal ganglia calcification, idiopathic, Dystonia, torsion, Mucopolysaccharidosis, MPS-III-C, Retinitis pigmentosa, Mucopolysaccharidosis, MPS-III-C, Vesicoureteral reflux, CHARGE association, Ataxia with vitamin E deficiency, nocturnal frontal lobe epilepsy, Joubert syndrome, Melnick-Fraser syndrome, Osteopetrosis with renal tubular acidosis, carbonic anhydrase II variant, Achromatopsia, Hereditary cancer-predisposing syndrome, Microcephaly, normal intelligence and immunodeficiency, Microcephaly, normal intelligence and immunodeficiency, Joubert syndrome, Meckel syndrome type 3, Nephronophthisis, Meckel-Gruber syndrome, coach syndrome, Pyruvate dehydrogenase phosphatase deficiency, Carcinoma of colon, Leigh syndrome, multiple synostoses syndrome, Microphthalmia, isolated, Klippel-Feil syndrome, autosomal dominant, Leber congenital amaurosis, Klippel-Feil syndrome, autosomal dominant, Anauxetic dysplasia, Cohen syndrome, Cohen syndrome, Abnormality of the eye, Ciliary dyskinesia, primary, 28, Epilepsy, nocturnal frontal lobe, Corneal dystrophy, corneal dystrophy, posterior polymorphous, RRM2B-related mitochondrial disease, Mitochondrial DNA depletion syndrome, encephalomyopathic form, with renal tubulopathy, RRM2B-related mitochondrial disease, Nail disorder, nonsyndromic congenital, Nail disease, Dihydropyrimidinase deficiency, Tetraamelia syndrome, Trichorhinophalangeal dysplasia type I, Multiple congenital exostosis, Dandy-Walker like malformation with atrioventricular septal defect, Benign familial neonatal seizures, Ciliary dyskinesia, primary, Iodotyrosyl coupling defect, Mental retardation, autosomal recessive, Deficiency of steroid 11-beta-monooxygenase, Corticosterone methyloxidase type 1 deficiency, Hyperlipoproteinemia, type ID, Amelogenesis imperfecta, hypocalcification type, 5-Oxoprolinase deficiency, Mitochondrial complex III deficiency, nuclear type 6, Brown-Vialetto-Van Laere syndrome, Hereditary acrodermatitis enteropathica, Rothmund-Thomson syndrome, Baller-Gerold syndrome, Hyperimmunoglobulin E recurrent infection syndrome, autosomal recessive, Nicolaides-Baraitser syndrome, Cerebellar ataxia, mental retardation, and dysequilibrium syndrome, Retinal cone dystrophy, Familial erythrocytosis, Chronic myelogenous leukemia, Polycythemia vera, Budd-Chiari syndrome, Myelofibrosis, Budd-Chiari syndrome, susceptibility to, somatic, Acute myeloid leukemia, Thrombocythemia, Myeloproliferative disorder, Subacute lymphoid leukemia, Non-ketotic hyperglycinemia, Hydrocephalus, Melanoma-pancreatic cancer syndrome, Hereditary cutaneous melanoma, Hereditary cancer-predisposing syndrome, Cutaneous malignant melanoma, Hereditary cutaneous melanoma, Hereditary cancer-predisposing syndrome, Hereditary cutaneous melanoma, Melanoma-pancreatic cancer syndrome, Hereditary cutaneous melanoma, Hereditary cancer-predisposing syndrome, neurodevelopmental disorder with progressive microcephaly, spasticity, and brain anomalies, Bardet-Biedl syndrome, Glaucoma, primary congenital, Singleton-Merten syndrome, Ciliary dyskinesia, Distal spinal muscular atrophy, autosomal recessive, Deficiency of UDPglucose-hexose-1-phosphate uridylyltransferase, Deficiency of UDPglucose-hexose-1-phosphate uridylyltransferase, Galactosemia, Inclusion body myopathy with early-onset paget disease and frontotemporal dementia, Fanconi anemia, complementation group G, Metaphyseal chondrodysplasia, McKusick type, Acromesomelic dysplasia Maroteaux type, Inclusion body myopathy, Nonaka myopathy, Sialuria, GNE myopathy, Sialuria, Inclusion body myopathy, Nonaka myopathy, Sialuria, Primary hyperoxaluria, type II, Pontocerebellar hypoplasia, type 1b, Friedreich's ataxia, Progressive familial intrahepatic cholestasis, Hypomagnesemia, intestinal, Cone-rod dystrophy and hearing loss, Obesity, hyperphagia, and developmental delay, AGTPBP1-related condition, Type B brachydactyly, Fructose-biphosphatase deficiency, Fanconi anemia, Fanconi anemia, complementation group C, Hereditary cancer-predisposing syndrome, Gorlin syndrome, Gorlin syndrome, Hereditary cancer-predisposing syndrome, Xeroderma pigmentosum, type 1, Spondyloepimetaphyseal dysplasia Genevieve type, Early infantile epileptic encephalopathy 59, Loeys-Dietz syndrome, Thoracic aortic aneurysm and aortic dissection, Loeys-Dietz syndrome, Congenital disorder of glycosylation type 1, Hereditary fructosuria, Familial hypoalphalipoproteinemia, Tangier disease, Limb-girdle muscular dystrophy-dystroglycanopathy, type C4, Congenital muscular dystrophy-dystroglycanopathy with brain and eye anomalies, type A4, Primary autosomal recessive microcephaly, Meretoja syndrome, adrenal insufficiency, NR5A1-related, 46,XY sex reversal, type 3, Nail-patella syndrome, Early infantile epileptic encephalopathy 4, Epileptic encephalopathy, Primary pulmonary hypertension, Osler hemorrhagic telangiectasia syndrome, Coenzyme Q10 deficiency, primary, Ichthyosis prematurity syndrome, Congenital disorder of glycosylation type 1M, Citrullinemia type I, Citrullinemia type I, Citrullinemia, mild, Neuropathy, hereditary sensory and autonomic, type VIII, short stature, hearing loss, retinis pigmentosa, and distinctive facies, Cortical malformations, occipital, Limb-girdle muscular dystrophy-dystroglycanopathy, type C1, Congenital muscular dystrophy-dystroglycanopathy with mental retardation, type B1, Walker-Warburg congenital muscular dystrophy, Spinocerebellar ataxia autosomal recessive, Tuberous sclerosis syndrome, Tuberous sclerosis, Lymphangiomyomatosis, Congenital nonprogressive myopathy with Moebius and Robin sequences, Dopamine beta hydroxylase deficiency, Ehlers-Danlos syndrome, type 2, Ehlers-Danlos syndrome, classic type, Early infantile epileptic encephalopathy, Epilepsy, nocturnal frontal lobe, Joubert syndrome, Adams-Oliver syndrome, Aortic valve disorder, Adams-Oliver syndrome, Congenital generalized lipodystrophy type 1, Neurodevelopmental disorder with or without hyperkinetic movements and seizures, autosomal dominant, Autosomal recessive hypophosphatemic bone disease, Chromosome 9q deletion syndrome, Neoplasm of stomach, Prostate cancer, somatic, Refsum disease, adult, Severe combined immunodeficiency, athabascan-type, Renal adysplasia, Megaloblastic anemia due to inborn errors of metabolism, Primary ciliary dyskinesia, Kartagener syndrome, Desanto-shinawi syndrome, Neural tube defect, Familial medullary thyroid carcinoma, Multiple endocrine neoplasia, type 2, MEN2A and FMTC, Multiple endocrine neoplasia, type 2, MEN2A and Unclassified, MEN2A and FMTC, Multiple endocrine neoplasia, type 2, MEN2A and FMTC, Hereditary cancer-predisposing syndrome, Multiple endocrine neoplasia, type 2b, Familial medullary thyroid carcinoma, Multiple endocrine neoplasia, type 2a, Multiple endocrine neoplasia, type 2, MEN2A and FMTC, FMTC and Unclassified, Multiple endocrine neoplasia, type 2a, Hereditary cancer-predisposing syndrome, Pheochromocytoma, Familial medullary thyroid carcinoma, Multiple endocrine neoplasia, type 2a, Multiple endocrine neoplasia, type 2, MEN2A and FMTC, Medullary thyroid carcinoma, Multiple endocrine neoplasia, type 2a, Multiple endocrine neoplasia, type 2, MEN2 phenotype: Unknown, Hereditary cancer-predisposing syndrome, Multiple endocrine neoplasia, type 2b, Multiple endocrine neoplasia, type 2a, MEN2 phenotype: Unclassified, Multiple endocrine neoplasia, type 2, MEN2A and FMTC, Hereditary cancer-predisposing syndrome, Familial medullary thyroid carcinoma, Multiple endocrine neoplasia, type 2a, MEN2A and FMTC, Hereditary cancer-predisposing syndrome, Multiple endocrine neoplasia, Telangiectasia, hereditary hemorrhagic, type 5, Cockayne syndrome B, Premature ovarian failure, Familial infantile myasthenia, Charcot-Marie-Tooth disease, demyelinating, type 1d, Congenital hypomyelinating neuropathy, Neuropathy, congenital hypomyelinating, autosomal dominant, Shprintzen-Goldberg syndrome, Goldberg-Shprintzen megacolon syndrome, Shprintzen-Goldberg syndrome, Diarrhea, malabsorptive, congenital, Aplastic anemia, Hemophagocytic lymphohistiocytosis, familial, nephrotic syndrome, Hyperphenylalaninemia, BH4-deficient, D, Histiocytosis-lymphadenopathy plus syndrome, Usher syndrome, type 1D, pituitary adenoma, multiple types, Usher syndrome, type 1D, Usher syndrome, type 1D, Gaucher disease, atypical, due to saposin C deficiency, Krabbe disease atypical due to Saposin A deficiency, Combined saposin deficiency, Sphingolipid activator protein deficiency, Gaucher disease, atypical, due to saposin C deficiency, Spondyloepiphyseal dysplasia with congenital joint dislocations, Dilated cardiomyopathy 1W, Familial hypertrophic cardiomyopathy, Cardiovascular phenotype, Hypermethioninemia due to adenosine kinase deficiency, Genitopatellar syndrome, Young Simpson syndrome, Hypomyelinating leukodystrophy, Idiopathic fibrosing alveolitis, chronic form, Hepatic methionine adenosyltransferase deficiency, Hereditary cancer-predisposing syndrome, Juvenile polyposis syndrome, Juvenile polyposis syndrome, Hereditary cancer-predisposing syndrome, Hyperinsulinism-hyperammonemia syndrome, Spondyloepimetaphyseal dysplasia, pakistani type, hyperekplexia, Cowden syndrome, PTEN hamartoma tumor syndrome, Hereditary cancer-predisposing syndrome, Hereditary cancer-predisposing syndrome, Neoplasm of the breast, PTEN hamartoma tumor syndrome, Malignant melanoma of skin, Squamous cell carcinoma of the head and neck, Small cell lung cancer, Squamous cell lung carcinoma, Renal cell carcinoma, papillary, Neoplasm of the breast, Glioblastoma, Hereditary cancer-predisposing syndrome, Colorectal Neoplasms, Uterine cervical neoplasms, Adenocarcinoma of stomach, Malignant neoplasm of body of uterus, Adenocarcinoma of prostate, Uterine Carcinosarcoma, PTEN hamartoma tumor syndrome, Cowden syndrome, Hereditary cancer-predisposing syndrome, Hereditary cancer-predisposing syndrome, Lhermitte-Duclos disease, Neoplasm of the breast, Colorectal Neoplasms, Hereditary cancer-predisposing syndrome, Macrocephaly/autism syndrome, Hereditary cancer-predisposing syndrome, PTEN hamartoma tumor syndrome, Cutaneous melanoma, Hereditary cancer-predisposing syndrome, PTEN hamartoma tumor syndrome, Hereditary cancer-predisposing syndrome, Autoimmune lymphoproliferative syndrome, type 1a, Lysosomal acid lipase deficiency, Microcephaly with or without chorioretinopathy, lymphedema, or mental retardation, Hydranencephaly with renal aplasia-dysplasia, Spastic paraplegia, Cutis laxa, autosomal dominant, Primary hyperoxaluria, type III, Spastic tetraparesis, Hermansky-Pudlak syndrome, Dubin-Johnson syndrome, Renal coloboma syndrome, Autosomal dominant progressive external ophthalmoplegia with mitochondrial DNA deletions, Mitochondrial diseases, Autosomal dominant progressive external ophthalmoplegia with mitochondrial DNA deletions, Mitochondrial diseases, Kallmann syndrome, Combined partial 17-alpha-hydroxylase/17,20-lyase deficiency, Complete combined 17-alpha-hydroxylase/17,20-lyase deficiency, Cerebroretinal microangiopathy with calcifications and cysts, Adult junctional epidermolysis bullosa, Epidermolysis bullosa, junctional, spermatogenic failure, Primary dilated cardiomyopathy, Dilated cardiomyopathy, Microphthalmia, syndromic, Myofibrillar myopathy, BAG3-related, Myofibrillar myopathy, BAG3-related, Dilated cardiomyopathy, Jackson-Weiss syndrome, Craniosynostosis, nonsyndromic unicoronal, Pfeiffer syndrome, Craniofacial-skeletal-dermatologic dysplasia, FGFR2 related craniosynostosis, Pfeiffer syndrome, FGFR2 related craniosynostosis, Cerebral arteriopathy, autosomal dominant, with subcortical infarcts and leukoencephalopathy, type 2, Ornithine aminotransferase deficiency, Congenital erythropoietic porphyria, Muscular hypotonia, Muscular hypotonia, Intellectual disability (severe), Hypotonia, ataxia, and delayed development syndrome, Global developmental delay, Expressive language delay, Intellectual disability, Ataxia, Muscular hypotonia, Hypotonia, ataxia, and delayed development syndrome, Mitochondrial short-chain enoyl-coa hydratase deficiency, Noonan syndrome, Follicular thyroid carcinoma, Spermatocytic seminoma, somatic, Spermatocytic seminoma, Neoplasm of the breast, Costello syndrome, Myopathy, congenital, with excess of muscle spindles, Liver cancer, Chronic lymphocytic leukemia, Malignant melanoma of skin, Multiple myeloma, Squamous cell carcinoma of the head and neck, Costello syndrome, Lung adenocarcinoma, Squamous cell lung carcinoma, Acute myeloid leukemia, Neoplasm of the breast, Hepatocellular carcinoma, Pancreatic adenocarcinoma, Squamous cell carcinoma of the skin, Transitional cell carcinoma of the bladder, Colorectal Neoplasms, Uterine cervical neoplasms, Thymoma, Adenocarcinoma of stomach, Malignant neoplasm of body of uterus, Liver cancer, Chronic lymphocytic leukemia, Malignant melanoma of skin, Multiple myeloma, Squamous cell carcinoma of the head and neck, Costello syndrome, Lung adenocarcinoma, Squamous cell lung carcinoma, Acute myeloid leukemia, Rasopathy, Neoplasm of the breast, Hepatocellular carcinoma, Pancreatic adenocarcinoma, Squamous cell carcinoma of the skin, Transitional cell carcinoma of the bladder, Neoplasm, Colorectal Neoplasms, Uterine cervical neoplasms, Neoplasm of the thyroid gland, Adenocarcinoma of stomach, Malignant neoplasm of body of uterus, Malignant tumor of urinary bladder, Costello syndrome, Epidermal nevus, Myopathy, congenital, with excess of muscle spindles, Cutaneous melanoma, Neoplasm of the thyroid gland, Liver cancer, Malignant melanoma of skin, Multiple myeloma, Squamous cell carcinoma of the head and neck, Costello syndrome, Epidermal nevus, Lung adenocarcinoma, Acute myeloid leukemia, Myelodysplastic syndrome, Nevus sebaceous, Nevus sebaceous, somatic, Rasopathy, Neoplasm of the breast, Glioblastoma, Bladder carcinoma, Hepatocellular carcinoma, Pancreatic adenocarcinoma, Squamous cell carcinoma of the skin, Transitional cell carcinoma of the bladder, Carcinoma of esophagus, Colorectal Neoplasms, Uterine cervical neoplasms, Neoplasm of the thyroid gland, Papillary renal cell carcinoma, sporadic, Adenoid cystic carcinoma, Nasopharyngeal Neoplasms, Adenocarcinoma of stomach, Ovarian Serous Cystadenocarcinoma, Malignant neoplasm of body of uterus, Adenocarcinoma of prostate, Uterine Carcinosarcoma, Early myoclonic encephalopathy, Neutral lipid storage disease with myopathy, Ceroid lipofuscinosis neuronal, Growth restriction, severe, with distinctive facies, Hyperproinsulinemia, Permanent neonatal diabetes mellitus, Hyperproinsulinemia, Segawa syndrome, autosomal recessive, Dystonia, Segawa syndrome, autosomal recessive, Jervell and Lange-Nielsen syndrome, Long QT syndrome, Cardiovascular phenotype, Congenital long QT syndrome, Long QT syndrome, Congenital long QT syndrome, Long QT syndrome, Long QT syndrome 1/2, digenic, Long QT syndrome, Congenital long QT syndrome, Cardiovascular phenotype, Long QT syndrome, Congenital long QT syndrome, Long QT syndrome, Cardiovascular phenotype, Beckwith-Wiedemann syndrome, Intrauterine growth retardation, metaphyseal dysplasia, adrenal hypoplasia congenita, and genital anomalies, Intrauterine growth retardation, metaphyseal dysplasia, adrenal hypoplasia congenita, and genital anomalies, Russell-Silver syndrome, Beckwith-Wiedemann syndrome, Myopathy with tubular aggregates, hemoglobin Ohio, erythrocytosis, hemoglobin TY gard, erythrocytosis, Beta-thalassemia, dominant inclusion body type, Hemoglobinopathy, Beta-plus-thalassemia, Beta thalassemia intermedia, hemoglobin Ypsilanti, erythrocytosis, beta\hat{ }0\hat{ } Thalassemia, Heinz body anemia, Beta-plus-thalassemia, Beta thalassemia major, beta\hat{ }0\hat{ } Thalassemia, beta Thalassemia, Beta-plus-thalassemia, Hemoglobin Knossos, Beta-knossos-thalassemia, beta Thalassemia, Hemoglobin Palmerston north, erythrocytosis, Hb niigata, Beta-plus-thalassemia, beta Thalassemia, Beta thalassemia intermedia, beta Thalassemia, delta Thalassemia, hemoglobin A(2) Yialousa, Fetal hemoglobin quantitative trait locus 1, Sphingomyelin/cholesterol lipidosis, Niemann-Pick disease, type B, Niemann-Pick disease, type A, Niemann-pick disease, intermediate, protracted neurovisceral, Sphingomyelin/cholesterol lipidosis, Niemann-Pick disease, type B, Niemann-Pick disease, type A, Niemann-Pick disease, type B, Niemann-Pick disease, type A, Sphingomyelin/cholesterol lipidosis, Ceroid lipofuscinosis neuronal, Neuronal ceroid lipofuscinosis, Van Maldergem syndrome, Permanent neonatal diabetes mellitus, Permanent neonatal diabetes mellitus, Diabetes mellitus, permanent neonatal, with neurologic features, Islet cell hyperplasia, Permanent neonatal diabetes mellitus, Persistent hyperinsulinemic hypoglycemia of infancy, Permanent neonatal diabetes mellitus, Hyperekplexia, Gnathodiaphyseal dysplasia, Limb-girdle muscular dystrophy, type 2L, Gnathodiaphyseal dysplasia, Limb-girdle muscular dystrophy, type 2L, Miyoshi muscular dystrophy, ANO5-Related Disorders, Limb-girdle muscular dystrophy, type 2L, Elevated serum creatine phosphokinase, Myopathy, Distal muscle weakness, Fatty replacement of skeletal muscle, Limb-girdle muscular dystrophy, type 2L, Follicle-stimulating hormone deficiency, isolated, Aniridia, Irido-corneo-trabecular dysgenesis, Foveal hypoplasia with cataract, Irido-corneo-trabecular dysgenesis, Anophthalmia-microphthalmia, Aniridia, Irido-corneo-trabecular dysgenesis, Wilms tumor, Combined cellular and humoral immune defects with granulomas, Severe combined immunodeficiency, B cell-negative, Histiocytic medullary reticulosis, Severe immunodeficiency, autosomal recessive, T-cell negative, B-cell negative, NK cell-positive, Combined cellular and humoral immune defects with granulomas, Multiple exostoses type 2, Parietal foramina, Congenital disorder of glycosylation type 2C, Thrombophilia, Hereditary factor II deficiency disease, Xeroderma pigmentosum, group E, Left ventricular noncompaction, Hypertrophic cardiomyopathy, Primary familial hypertrophic cardiomyopathy, Hypertrophic cardiomyopathy, Cardiovascular phenotype, Primary familial hypertrophic cardiomyopathy, Cardiovascular phenotype, Familial hypertrophic cardiomyopathy, Primary familial hypertrophic cardiomyopathy, Hypertrophic, Primary familial hypertrophic cardiomyopathy, Cardiovascular phenotype, Familial hypertrophic cardiomyopathy, Familial hypertrophic cardiomyopathy, Primary familial hypertrophic cardiomyopathy, Hypertrophic cardiomyopathy, Cardiovascular phenotype, Primary familial hypertrophic cardiomyopathy, Hypertrophic cardiomyopathy, Primary familial hypertrophic cardiomyopathy, Primary familial hypertrophic cardiomyopathy, Hypertrophic cardiomyopathy, Hypertrophic cardiomyopathy, Primary familial hypertrophic cardiomyopathy, Cardiovascular phenotype, Familial hypertrophic cardiomyopathy, Cardiovascular phenotype, Primary familial hypertrophic cardiomyopathy, Familial hypertrophic cardiomyopathy, Hypertrophic cardiomyopathy, Myasthenic syndrome, congenital, associated with acetylcholine receptor deficiency, Pena-Shokeir syndrome type I, Myasthenic syndrome, congenital, associated with acetylcholine receptor deficiency, Congenital myasthenic syndrome, Myopathy, Myasthenic syndrome, congenital, associated with acetylcholine receptor deficiency, Congenital Myasthenic Syndrome, Recessive, Myasthenic syndrome, congenital, associated with acetylcholine receptor deficiency, Hereditary angioedema type 1, Hereditary C1 esterase inhibitor deficiency—dysfunctional factor, Poikiloderma, hereditary fibrosing, with tendon contractures, myopathy, and pulmonary fibrosis, Gracile bone dysplasia, Joubert syndrome, Joubert syndrome, Meckel syndrome type, Retinal dystrophy, polycystic kidney disease with polycystic liver disease, Congenital generalized lipodystrophy type 2, Charcot-Marie-Tooth disease, type 2, Encephalopathy, progressive, with or without lipodystrophy, Familial renal hypouricemia, Platelet-type bleeding disorder, Glycogen storage disease, type V, Hereditary cancer-predisposing syndrome, Multiple endocrine neoplasia, type 1, Hereditary cancer-predisposing syndrome, Hereditary cancer-predisposing syndrome, Multiple endocrine neoplasia, type 1, Multiple endocrine neoplasia, type 1, Hereditary cancer-predisposing syndrome, Coffin-Siris syndrome, Calfan syndrome, Verloes Bourguignon syndrome, Bardet-Biedl syndrome, Bardet-Biedl syndrome, Spinocerebellar ataxia, autosomal recessive, Pyruvate carboxylase deficiency, Cold-induced sweating syndrome, Crisponi/Cold-induced sweating syndrome, Somatotroph adenoma, Pituitary adenoma predisposition, Mitochondrial complex I deficiency, Osteopetrosis autosomal recessive, Severe congenital neutropenia autosomal dominant, congenital neutropenia, High bone mass, Osteoporosis with pseudoglioma, Epilepsy, familial temporal lobe, Carnitine palmitoyltransferase I deficiency, Charcot-Marie-Tooth disease, Charcot-Marie-Tooth disease, axonal, type 2S, IGHMBP2-related condition, Spinal muscular atrophy, distal, autosomal recessive, Charcot-Marie-Tooth disease, axonal, type 2S, Werdnig-Hoffmann disease, Charcot-Marie-Tooth disease, axonal, type 2S, Deafness with labyrinthine aplasia microtia and microdontia (LAMM), Smith-Lemli-Opitz syndrome, Cerebral folate deficiency, Opsismodysplasia, 3-methylglutaconic aciduria with cataracts, neurologic involvement, and neutropenia, Joubert syndrome, Vitreoretinopathy, neovascular inflammatory, Usher syndrome, type 1, Usher syndrome, type 1, Usher syndrome, type 1B, Usher syndrome, type 1, MYO7A-Related Disorders, polycystic liver disease with or without kidney cysts, Tremor, hereditary essential, Mitochondrial complex I deficiency, Mitochondrial diseases, Tyrosinase-negative oculocutaneous albinism, Tyrosinase-negative oculocutaneous albinism, Oculocutaneous albinism type 1B, Albinism, ocular, with sensorineural deafness, Skin/hair/eye pigmentation, variation in, Oculocutaneous albinism, Hereditary cancer-predisposing syndrome, Ataxia-telangiectasia-like disorder, Charcot-Marie-Tooth disease, type 4B1, Focal segmental glomerulosclerosis, Coloboma, ocular, with or without hearing impairment, cleft lip/palate, and/or mental retardation, Metaphyseal chondrodysplasia, Spahr type, Short-rib polydactyly syndrome type III, Jeune thoracic dystrophy, Short-rib thoracic dysplasia with or without polydactyly, Short-rib polydactyly syndrome type I, Short-rib polydactyly syndrome type III, Deficiency of acetyl-CoA acetyltransferase, Hereditary cancer-predisposing syndrome, Ataxia-telangiectasia syndrome, Ataxia-telangiectasia syndrome, Ataxia-telangiectasia variant, Pyruvate dehydrogenase E2 deficiency, Pheochromocytoma, Paragangliomas, Hereditary cancer-predisposing syndrome, Paragangliomas, Hereditary Paraganglioma-Pheochromocytoma Syndromes, Paraganglioma and gastric stromal sarcoma, Pheochromocytoma, Paragangliomas, Hereditary Paraganglioma-Pheochromocytoma Syndromes, Cowden syndrome, Paraganglioma and gastric stromal sarcoma, Pheochromocytoma, Mitochondrial complex II deficiency, Paragangliomas, Hereditary Paraganglioma-Pheochromocytoma Syndromes, Cowden syndrome 3, Apolipoprotein A-IV polymorphism, APOA4*1/APOA4*2, Hyperalphalipoproteinemia, Coronary heart disease, Apolipoprotein A-I (Baltimore), Immunodeficiency, Kabuki syndrome, Wiedemann-Steiner syndrome, Short stature, rhizomelic, with microcephaly, micrognathia, and developmental delay, Glucose-6-phosphate transport defect, Acute intermittent porphyria, Congenital myasthenic syndrome, Noonan syndrome-like disorder with or without juvenile myelomonocytic leukemia, Microphthalmia, isolated, Gaze palsy, familial horizontal, with progressive scoliosis, Megalencephalic leukoencephalopathy with subcortical cysts 2a, Deficiency of isobutyryl-CoA dehydrogenase, Cone dystrophy, Retinal cone dystrophy, Megalencephaly-polymicrogyria-polydactyly-hydrocephalus syndrome, Tumoral calcinosis, familial, hyperphosphatemic, Episodic ataxia type 1, Myokymia, Atrial fibrillation, familial, von Willebrand disease type 3, von Willebrand disease type 2N, von Willebrand disease type 2N, TNF receptor-associated periodic fever syndrome (TRAPS), Sifrim-Hitz-Weiss syndrome, Triosephosphate isomerase deficiency, Ehlers-Danlos syndrome, type 8, Immunodeficiency with hyper IgM type 2, Aortic aneurysm, familial thoracic, Acute myeloid leukemia, Diarrhea, Brachydactyly with hypertension, Hypoglycemia with deficiency of glycogen synthetase in the liver, Lamb-shaffer syndrome, Non-small cell lung cancer, Colorectal Neoplasms, Neoplasm of the thyroid gland, Non-small cell lung cancer, Rasopathy, on-small cell lung cancer, Colorectal Neoplasms, Neoplasm of the thyroid gland, cetuximab response—Dosage, panitumumab response—Dosage, Non-small cell lung cancer, RAS-associated autoimmune leukoproliferative disorder, Colorectal Neoplasms, Cerebral arteriovenous malformation, Juvenile myelomonocytic leukemia, Carcinoma of pancreas, Non-small cell lung cancer, Acute myeloid leukemia, Nevus sebaceous, Nevus sebaceous, somatic, Ovarian Neoplasms, Colorectal Neoplasms, Neoplasm of the thyroid gland, Endometrial carcinoma, Lung cancer, Lung adenocarcinoma, Non-small cell lung cancer, Ovarian Neoplasms, Colorectal Neoplasms, Neoplasm of the thyroid gland, Charcot-Marie-Tooth disease, type 4H, Optic atrophy, Encephalopathy due to defective mitochondrial and peroxisomal fission, Arrhythmogenic right ventricular cardiomyopathy, Arrhythmogenic right ventricular cardiomyopathy, type 9, Arrhythmogenic right ventricular dysplasia/cardiomyopathy, Cardiovascular phenotype, Parkinson disease, late-onset, Parkinson disease, autosomal dominant, IRAK4 deficiency, Vitamin D-dependent rickets, type 2, Spondyloperipheral dysplasia, Short ribs, Absent vertebral body mineralization, Spondylometaphyseal dysplasia, Stickler syndrome type 1, Stickler syndrome, type I, nonsyndromic ocular, Achondrogenesis, type II, Stickler syndrome type 1, Spondylometaphyseal dysplasia, Spondylometaphyseal dysplasia, Stickler syndrome, type I, nonsyndromic ocular, Glycogen storage disease, type VII, Glycogen storage disease, type VII, Osteogenesis imperfecta, type xv, Osteogenesis imperfecta, type xv, Osteogenesis imperfecta, type xv, Kabuki syndrome, Smith-Magenis Syndrome-like, Lissencephaly, Diabetes insipidus, nephrogenic, autosomal recessive, Diffuse palmoplantar keratoderma, Bothnian type, Hypochromic microcytic anemia with iron overload, Early infantile epileptic encephalopathy, Hereditary hemorrhagic telangiectasia type 2, Pulmonary arterial hypertension related to hereditary hemorrhagic telangiectasia, Primary pulmonary hypertension, Beaded hair, Pachyonychia congenita, Epidermolysis bullosa simplex, Dowling-Meara type, with severe palmoplantar keratoderma, Epidermolysis bullosa simplex, Cockayne-Touraine type, Epidermolysis bullosa simplex, Koebner type, Dowling-Degos disease, Ichthyosis bullosa of Siemens, Bullous ichthyosiform erythroderma, Cirrhosis, cryptogenic, Cirrhosis, noncryptogenic, susceptibility to, Glucocorticoid deficiency with achalasia, Ectodermal dysplasia, hair/nail type, Pigmentary retinal dystrophy, Fundus albipunctatus, autosomal recessive, Sulfite oxidase deficiency, isolated, Immunodeficiency, Congenital cataract, axonal, type 2u, Nephrotic syndrome, type 11, Bardet-Biedl syndrome, Myopathy, centronuclear, Joubert syndrome, Leber congenital amaurosis, Meckel syndrome type 4, Senior-Loken syndrome, Bardet-Biedl syndrome, Joubert syndrome, Leber congenital amaurosis, Meckel-Gruber syndrome, Meckel syndrome type 4, Senior-Loken syndrome, Joubert syndrome, Bardet-Biedl syndrome, Nephronophthisis, Meckel-Gruber syndrome, Nephronophthisis, Leber congenital amaurosis, Meckel syndrome type 4, Senior-Loken syndrome, Meckel-Gruber syndrome, Nephronophthisis, CEP290-Related Disorders, Leber congenital amaurosis, Meckel syndrome type 4, Senior-Loken syndrome, Leber congenital amaurosis, Meckel syndrome type 4, Senior-Loken syndrome, Cone-rod dystrophy, Cornea plana, Nephronophthisis, I cell disease, Pseudo-Hurler polydystrophy, Phenylketonuria, Hyperphenylalaninemia, non-pku, Congenital central hypoventilation, Hypomyelinating leukodystrophy, with or without oligodontia and/or hypogonadotropic hypogonadism, Methylmalonic aciduria cblB type, Methylmalonic academia, Spondylometaphyseal dysplasia, Kozlowski type, Skeletal dysplasia, Charcot-Marie-Tooth disease type 2C, Skeletal dysplasia, Neuromuscular Diseases, Digital arthropathy-brachydactyly, familial, Metatrophic dysplasia, Spondylometaphyseal dysplasia, Distal spinal muscular atrophy, congenital nonprogressive, Scapuloperoneal spinal muscular atrophy, Charcot-Marie-Tooth disease type 2C, Skeletal dysplasia, Neuromuscular Diseases, Charcot-Marie-Tooth, Type 2, Brachyolmia, Metatrophic dysplasia, Skeletal dysplasia, Neuromuscular Diseases, Darier disease, acral hemorrhagic type, Darier disease, segmental, Familial hypertrophic cardiomyopathy, Primary familial hypertrophic cardiomyopathy, Familial hypertrophic cardiomyopathy, Death in infancy, Ventricular extrasystoles, Cardiovascular phenotype, Noonan syndrome, Noonan syndrome, Rasopathy, Juvenile myelomonocytic leukemia, Noonan syndrome, Leopard syndrome, Rasopathy, Metachondromatosis, Noonan syndrome with multiple lentigines, Noonan syndrome 1, LEOPARD syndrome, Scoliosis, Rasopathy, Abnormal facial shape, Cafe-au-lait spot, Specific learning disability, Intellectual disability, mild, Aortic valve disease, Holt-Oram syndrome, Mental retardation and distinctive facial features with or without cardiac defects, Charcot-Marie-Tooth disease, type 2L, Microcephaly, primary, autosomal recessive, Deficiency of butyryl-CoA dehydrogenase, Maturity-onset diabetes of the young, type 3, Immune dysfunction with T-cell inactivation due to calcium entry defect, Leukoencephalopathy with vanishing white matter, Joubert syndrome, Cutis laxa with osteodystrophy, Myopathy, lactic acidosis, and sideroblastic anemia, Knuckle pads, deafness and leukonychia syndrome, Keratitis-ichthyosis-deafness syndrome, autosomal dominant, Mutilating keratoderma, Hystrix-like ichthyosis with deafness, Keratitis-ichthyosis-deafness syndrome, autosomal dominant, Keratoderma palmoplantar deafness, Knuckle pads, deafness and leukonychia syndrome, Deafness, X-linked, Hearing impairment, Keratoderma palmoplantar deafness, Cardiomyopathy, Left ventricular noncompaction, Cardiomyopathy, Infantile muscular hypotonia, Combined oxidative phosphorylation deficiency, Pancreatic agenesis, congenital, Diabetes mellitus type 2, Acute lymphoid leukemia, Acute myeloid leukemia, Breast-ovarian cancer, familial, Hereditary breast and ovarian cancer syndrome, Breast-ovarian cancer, familial, Hereditary breast and ovarian cancer syndrome, Hereditary cancer-predisposing syndrome, Hereditary breast and ovarian cancer syndrome, Familial cancer of breast, Breast-ovarian cancer, familial, Hereditary breast and ovarian cancer syndrome, Hereditary cancer-predisposing syndrome, Familial cancer of breast, Breast-ovarian cancer, familial, Fanconi anemia, complementation group D1, Medulloblastoma, Wilms tumor, Malignant tumor of prostate, Tracheoesophageal fistula, Pancreatic cancer, Glioma susceptibility, Hereditary breast and ovarian cancer syndrome, Hereditary cancer-predisposing syndrome, Familial cancer of breast, Breast-ovarian cancer, familial, Hereditary breast and ovarian cancer syndrome, Neoplasm of the breast, Hereditary cancer-predisposing syndrome, Familial cancer of breast, Breast-ovarian cancer, familial, Fanconi anemia, complementation group D1, Medulloblastoma, Wilms tumor, Malignant tumor of prostate, Tracheoesophageal fistula, Pancreatic cancer, Glioma susceptibility, Hereditary breast and ovarian cancer syndrome, Hereditary cancer-predisposing syndrome, BRCA2-Related Disorders, Breast-ovarian cancer, familial, Fanconi anemia, complementation group D1, Fanconi anemia, Hereditary breast and ovarian cancer syndrome, Hereditary cancer-predisposing syndrome, Primary pulmonary hypertension, Congenital disorder of glycosylation type 2L, Hyperornithinemia-hyperammonemia-homocitrullinuria syndrome, Retinoblastoma, Retinoblastoma, Neoplasm, Small cell lung cancer, Neoplasm, Retinitis pigmentosa, Retinal dystrophy with or without extraocular anomalies, Retinitis pigmentosa, Retinal dystrophy with extraocular anomalies, Aicardi Goutieres syndrome, Wilson disease, Ceroid lipofuscinosis neuronal, Hirschsprung disease, Waardenburg syndrome type 4A, Deafness and myopia, Catel Manzke syndrome, Propionyl-CoA carboxylase deficiency, Hypotonia, infantile, with psychomotor retardation and characteristic facies, Congenital contractures of the limbs and face, hypotonia, and developmental delay, Xeroderma pigmentosum, group G, Xeroderma pigmentosum group g/Cockayne syndrome, Xeroderma pigmentosum, group G, Xeroderma pigmentosum, Schizencephaly, Angiopathy, hereditary, with nephropathy, aneurysms, and muscle cramps, Squamous cell carcinoma of the head and neck, Oguchi disease, Cone-rod dystrophy, Leber congenital amaurosis, Cone-Rod Dystrophy, Recessive, Autism, susceptibility to, Ocular coloboma, autosomal recessive, Lysinuric protein intolerance, Primary dilated cardiomyopathy, Wolff-Parkinson-White pattern, Dilated cardiomyopathy 1EE, Familial hypertrophic cardiomyopathy, Primary familial hypertrophic cardiomyopathy, Sudden cardiac death, Cardiovascular phenotype, Hypertrophic cardiomyopathy, Primary familial hypertrophic cardiomyopathy, Cardiovascular phenotype, Familial hypertrophic cardiomyopathy, Primary familial hypertrophic cardiomyopathy, Cardiovascular phenotype, Familial hypertrophic cardiomyopathy, Familial cardiomyopathy, Hypertrophic cardiomyopathy, Cardiomyopathy, Hypertrophic cardiomyopathy, Dyskeratosis congenita, Dyskeratosis congenita autosomal dominant, Dyskeratosis congenita autosomal dominant, Dyskeratosis congenita, autosomal dominant, Revesz syndrome, Dyskeratosis congenita autosomal dominant, Dyskeratosis congenita, Dyskeratosis Congenita, Dominant, Autosomal recessive congenital ichthyosis, Rett syndrome, congenital variant, Mitochondrial complex I deficiency, Ectodermal dysplasia, anhidrotic, with T-cell immunodeficiency, autosomal dominant, Benign hereditary chorea, Choreoathetosis, hypothyroidism, and neonatal respiratory distress, Partial congenital absence of teeth, Ciliary dyskinesia, primary, Kartagener syndrome, L-2-hydroxyglutaric aciduria, Penetrating foot ulcers, Distal sensory impairment, Osteomyelitis leading to amputation due to slow healing fractures, Distal lower limb muscle weakness, Glycogen storage disease, type VI, Dystonia, Dopa-responsive type, Microphthalmia syndromic, Anophthalmia, combined immunodeficiency and megaloblastic anemia, Hereditary cancer-predisposing syndrome, congential disorder of glycosylation with defective fucosylation, Leber congenital amaurosis, Platelet-type bleeding disorder, Alzheimer disease, type 3, Alzheimer disease, type 3, Pick's disease, Alzheimer disease, type 3, Frontotemporal dementia, Pick's disease, Acne inversa, familial, Coenzyme Q10 deficiency, primary, Methylmalonate semialdehyde dehydrogenase deficiency, Niemann-Pick disease type C2, Niemann-Pick disease, type C, Leukoencephalopathy with vanishing white matter, Carcinoma of colon, Endometrial carcinoma, Hereditary nonpolyposis colorectal cancer type 7, Lynch syndrome, MLH3-Related Lynch Syndrome, Nevus comedonicus, Proliferative vasculopathy and hydranencephaly-hydrocephaly syndrome, Cone-rod dystrophy, Congenital muscular dystrophy-dystroglycanopathy with brain and eye anomalies, type A2, Congenital muscular dystrophy-dystroglycanopathy with mental retardation, type B2, Limb-girdle muscular dystrophy-dystroglycanopathy, type C2, Neuropathy, hereditary sensory, type IC, Hereditary sensory and autonomic neuropathy type IC, Thyroid adenoma, hyperfunctioning, somatic, Thyroid adenoma, hyperfunctioning, Hypothyroidism, congenital, nongoitrous, Hyperthyroidism, nonautoimmune, Thyroid adenoma, hyperfunctioning, somatic, Thyroid adenoma, hyperfunctioning, Galactosylceramide beta-galactosidase deficiency, Leber congenital amaurosis, Autosomal recessive cutis laxa type IA, TRIP11-related condition, Alpha-1-antitrypsin deficiency, Pineoblastoma, DICER1-related pleuropulmonary blastoma cancer predisposition syndrome, Hereditary cancer-predisposing syndrome, Gabriele-De Vries Syndrome, Spinal muscular atrophy, SMA, Spinal muscular atrophy, lower extremity predominant, autosomal dominant, Mental retardation, autosomal dominant, Mental retardation, autosomal dominant, Charcot-Marie-Tooth disease, dominant intermediate E, cerebellar-facial-dental syndrome, Cerebellofaciodental syndrome, Precocious puberty, central, Schaaf-yang syndrome, Angelman syndrome, Epileptic encephalopathy, early infantile, Tyrosinase-positive oculocutaneous albinism, Congenital stationary night blindness, type 1C, Andermann syndrome, Familial hypertrophic cardiomyopathy, Familial pulmonary capillary hemangiomatosis, Isovaleric acidemia, type I, Adams-Oliver syndrome, Limb-girdle muscular dystrophy, type 2A, Spherocytosis type 5, Peeling skin syndrome, Peeling skin syndrome, acral type, Microcephaly and chorioretinopathy, autosomal recessive, Hypoproteinemia, hypercatabolic, Arginine:glycine amidinotransferase deficiency, Bartter syndrome, type 1, antenatal, Marfan syndrome, Marfan lipodystrophy syndrome, Cardiovascular phenotype, Marfan syndrome, Thoracic aortic aneurysm and aortic dissection, Thoracic aortic Aneurysm and dissection (TAAD), Cardiovascular phenotype, Stiff skin syndrome, Marfan syndrome, Thoracic aortic aneurysm and aortic dissection, Thoracic aortic Aneurysm and dissection (TAAD), Marfan Syndrome/Loeys-Dietz Syndrome/Familial Thoracic Aortic Aneurysms and Dissections, Cardiovascular phenotype, Seckel syndrome, Aromatase deficiency, Lethal congenital contracture syndrome, Intellectual developmental disorder with cardiac arrhythmia, Primary ciliary dyskinesia, Craniosynostosis, Parkinson disease, age at onset, susceptibility to, Parkinson disease, Parkinson disease, autosomal recessive early-onset, Hyperchlorhidrosis, isolated, Nemaline myopathy, Congenital stationary night blindness, type 1D, Lung adenocarcinoma, Non-small cell lung cancer, Cutaneous melanoma, Cardio-facio-cutaneous syndrome, Cardiofaciocutaneous syndrome, Cardio-facio-cutaneous syndrome, Aortic valve disease, Thoracic aortic aneurysm and aortic dissection, Cardiovascular phenotype, Loeys-Dietz syndrome, Ceroid lipofuscinosis neuronal, Tay-Sachs disease, Bardet-Biedl syndrome, Sick sinus syndrome, autosomal dominant, Tyrosinemia type I, Tyrosinemia type I, Hypertyrosinemia, Osteochondritis dissecans, Autosomal dominant progressive external ophthalmoplegia with mitochondrial DNA deletions 1, Progressive sclerosing poliodystrophy, Progressive sclerosing poliodystrophy, Mitochondrial diseases, Camptocormia, Acrocallosal syndrome, Schinzel type, Spondylocostal dysostosis, Liver cancer, Acute myeloid leukemia, Neoplasm of brain, Hepatocellular carcinoma, Brainstem glioma, Colorectal Neoplasms, Multiple myeloma, Squamous cell carcinoma of the head and neck, Acute myeloid leukemia, Myelodysplastic syndrome, Colorectal Neoplasms, Bloom syndrome, Bloom syndrome, Hereditary cancer-predisposing syndrome, Arthrogryposis renal dysfunction cholestasis syndrome, Epileptic encephalopathy, childhood-onset, Congenital heart defects, multiple types, Weill-Marchesani-like syndrome, Autosomal recessive congenital ichthyosis, Microphthalmia, isolated, Osteosclerotic metaphyseal dysplasia, alpha Thalassemia, Hemoglobin Loire, Erythrocytosis, Hemoglobin Chesapeake, Erythrocytosis, Hemoglobin Legnano, Erythrocytosis, Spinocerebellar ataxia, autosomal recessive, Mucolipidosis III Gamma, You-Hoover-Fong syndrome, Renal dysplasia, retinal pigmentary dystrophy, cerebellar ataxia and skeletal dysplasia, Joubert syndrome with Jeune asphyxiating thoracic dystrophy, Renal dysplasia, retinal pigmentary dystrophy, cerebellar ataxia and skeletal dysplasia, Retinis pigmentosa, Leigh syndrome, Combined oxidative phosphorylation deficiency, Tuberous sclerosis, Tuberous sclerosis syndrome, Lymphangiomyomatosis, Tuberous sclerosis syndrome, Polycystic kidney disease, adult type, Digitorenocerebral syndrome, Early infantile epileptic encephalopathy, Myoclonic epilepsy, familial infantile, Digitorenocerebral syndrome, Progressive myoclonus epilepsy with ataxia, Familial Mediterranean fever, Rubinstein-Taybi syndrome, Nephronophthisis, Congenital disorder of glycosylation type 1K, Carbohydrate-deficient glycoprotein syndrome type I, Carbohydrate-deficient glycoprotein syndrome type I, Congenital disorder of glycosylation, Epilepsy, focal, with speech disorder and with or without mental retardation, Rolandic epilepsy, Bare lymphocyte syndrome type 2, complementation group A, Charcot-Marie-Tooth disease, type 1C, Fanconi anemia, complementation group Q, Dyskeratosis congenita, Dyskeratosis congenita, autosomal recessive, Lissencephaly, Aortic aneurysm, familial thoracic, Pseudoxanthoma elasticum, Pseudoxanthoma elasticum, Generalized arterial calcification of infancy, Familial juvenile gout, Uromodulin-associated kidney disease, Medullary cystic kidney disease, Bronchiectasis with or without elevated sweat chloride, Familial cancer of breast, Fanconi anemia, complementation group N, Tracheoesophageal fistula, Pancreatic cancer, Hereditary breast and ovarian cancer syndrome, Hereditary cancer-predisposing syndrome, Familial cancer of breast, Pancreatic cancer, Progressive sensorineural hearing impairment, IL21R immunodeficiency, Juvenile neuronal ceroid lipofuscinosis, Ceroid lipofuscinosis, neuronal, protracted, Brody myopathy, Spondyloepimetaphyseal dysplasia with multiple dislocations, Spondylocostal dysostosis, Bile acid synthesis defect, congenital, Generalized epilepsy with febrile seizures plus, type 9, Warfarin response, warfarin response—Dosage, Warfarin response, Familial renal glucosuria, Glycogen storage disease IXb, Behcet's syndrome, Cylindromatosis, familial, Townes-Brocks syndrome, Joubert syndrome, Hamamy syndrome, Multicentric osteolysis, nodulosis and arthropathy, Bardet-Biedl syndrome, Retinitis pigmentosa, Nephrotic syndrome, type 12, Familial hypokalemia-hypomagnesemia, Spondyloepimetaphyseal dysplasia, Faden-Alkuraya type, Polymicrogyria, bilateral frontoparietal, Lissencephaly, with microcephaly, Retinitis pigmentosa, Poikiloderma with neutropenia, Brachioskeletogenital syndrome, Mitochondrial DNA depletion syndrome, Lamellar cataract, Combined T and B cell immunodeficiency, Dyskeratosis congenita, autosomal dominant, Dyskeratosis congenita, autosomal recessive, Norum disease, Acanthosis nigricans, Skeletal dysplasia, Insulin resistance, Short stature, Self-injurious behavior, Abnormal facial shape, Brachydactyly, Renal hypoplasia, Abnormality of the dentition, Hepatic steatosis, Obesity, Lumbar hyperlordosis, Hyperlipidemia, Short metacarpal, Intellectual disability, severe, Short stature, brachydactyly, intellectual developmental disability, and seizures, Acanthosis nigricans, Skeletal dysplasia, Insulin resistance, Short stature, Self-injurious behavior, Abnormal facial shape, Brachydactyly, Renal hypoplasia, Abnormality of the dentition, Hepatic steatosis, Obesity, Lumbar hyperlordosis, Hyperlipidemia, Short metacarpal, Intellectual disability, severe, Hereditary diffuse gastric cancer, Hereditary cancer-predisposing syndrome, Ectropion inferior cleft lip and or palate, Breast cancer, lobular, Hereditary diffuse gastric cancer, Hereditary cancer-predisposing syndrome, Ectropion inferior cleft lip and or palate, Congenital disorder of glycosylation type 2J, Striatonigral degeneration, childhood-onset, Ciliary dyskinesia, primary, Kartagener syndrome, Tyrosinemia type 2, Macular corneal dystrophy Type I, Macular corneal dystrophy, type II, Microcornea, myopic chorioretinal atrophy, and telecanthus, Spinocerebellar ataxia, autosomal recessive, Cataract, multiple types, Ayme-gripp syndrome, Giant axonal neuropathy, Autoinflammation, antibody deficiency, and immune dysregulation, plcg2-associated, Ciliary dyskinesia, primary, Persistent fetal circulation, Keratoconus, Corneal fragility keratoglobus, blue sclerae AND joint hypermobility, Keratoconus, Granulomatous disease, chronic, autosomal recessive, cytochrome b-negative, Chronic granulomatous disease, Granulomatous disease, chronic, autosomal recessive, cytochrome b-negative, Lymphedema, hereditary, III, Adenine phosphoribosyltransferase deficiency, Mucopolysaccharidosis, MPS-IV-A, KBG syndrome, Astigmatism, Cryptorchidism, Hypertelorism, Esotropia, Retrognathia, Hypermetropia, Wide nasal bridge, Cryptorchidism, Epicanthus, Hypertelorism, Astigmatism, Intellectual disability, Global developmental delay, Fanconi anemia, complementation group A, Fanconi anemia, Cutaneous malignant melanoma, Malignant Melanoma Susceptibility, Ciliary dyskinesia, primary, Syndactyly type 9, Retinitis pigmentosa, Lissencephaly, Spongy degeneration of central nervous system, Spongy degeneration of central nervous system, Canavan Disease, Familial Form, Palmoplantar keratoderma, mutilating, with periorificial keratotic plaques, Nephropathic cystinosis, Cystinosis, atypical nephropathic, Myasthenic syndrome, congenital, 4a, slow-channel, Myasthenic syndrome, congenital, associated with acetylcholine receptor deficiency, Congenital myasthenic syndrome 1B, fast-channel, Pseudo von Willebrand disease, Amyotrophic lateral sclerosis, Combined oxidative phosphorylation deficiency, Leber congenital amaurosis, Orofaciodigital syndrome XV, Very long chain acyl-CoA dehydrogenase deficiency, Myasthenic syndrome, congenital, slow-channel, Li-Fraumeni syndrome, Hereditary cancer-predisposing syndrome, Familial colorectal cancer, Malignant lymphoma, non-Hodgkin, Liver cancer, Chronic lymphocytic leukemia, Medulloblastoma, Malignant melanoma of skin, Multiple myeloma, Squamous cell carcinoma of the head and neck, Small cell lung cancer, Lung adenocarcinoma, Squamous cell lung carcinoma, Acute myeloid leukemia, Neoplasm of brain, Neoplasm of the breast, Glioblastoma, Hepatocellular carcinoma, Hereditary cancer-predisposing syndrome, Pancreatic adenocarcinoma, Transitional cell carcinoma of the bladder, Brainstem glioma, Carcinoma of esophagus, Colorectal Neoplasms, Adrenocortical carcinoma, Adenocarcinoma of stomach, Ovarian Serous Cystadenocarcinoma, Malignant neoplasm of body of uterus, Adenocarcinoma of prostate, Uterine Carcinosarcoma, Metastatic pancreatic neuroendocrine tumours, Liver cancer, Chronic lymphocytic leukemia, Medulloblastoma, Malignant melanoma of skin, Multiple myeloma, Squamous cell carcinoma of the head and neck, Small cell lung cancer, Lung adenocarcinoma, Squamous cell lung carcinoma, Acute myeloid leukemia, Neoplasm of brain, Neoplasm of the breast, Glioblastoma, Hepatocellular carcinoma, Hereditary cancer-predisposing syndrome, Pancreatic adenocarcinoma, Transitional cell carcinoma of the bladder, Brainstem glioma, Carcinoma of esophagus, Colorectal Neoplasms, Adrenocortical carcinoma, Adenocarcinoma of stomach, Ovarian Serous Cystadenocarcinoma, Malignant neoplasm of body of uterus, Adenocarcinoma of prostate, Uterine Carcinosarcoma, Medulloblastoma, Multiple myeloma, Squamous cell carcinoma of the head and neck, Li-Fraumeni syndrome, Lung adenocarcinoma, Renal cell carcinoma, papillary, Neoplasm of the breast, Hereditary cancer-predisposing syndrome, Pancreatic adenocarcinoma, Squamous cell carcinoma of the skin, Transitional cell carcinoma of the bladder, Colorectal Neoplasms, Adenocarcinoma of stomach, Ovarian Serous Cystadenocarcinoma, Malignant neoplasm of body of uterus, Hereditary cancer-predisposing syndrome, Carcinoma of cervix, Liver cancer, Li-Fraumeni syndrome, Hepatocellular carcinoma, Hereditary cancer-predisposing syndrome, Liver cancer, Squamous cell carcinoma of the head and neck, Li-Fraumeni syndrome, Lung adenocarcinoma, Li-Fraumeni syndrome, Squamous cell lung carcinoma, Neoplasm of brain, Neoplasm of the breast, Glioblastoma, Hepatocellular carcinoma, Hereditary cancer-predisposing syndrome, Pancreatic adenocarcinoma, Transitional cell carcinoma of the bladder, Brainstem glioma, Carcinoma of esophagus, Colorectal Neoplasms, Adenocarcinoma of stomach, Ovarian Serous Cystadenocarcinoma, Adenocarcinoma of prostate, Uterine Carcinosarcoma, Liver cancer, Chronic lymphocytic leukemia, Multiple myeloma, Squamous cell carcinoma of the head and neck, Lung adenocarcinoma, Li-Fraumeni syndrome, Neoplasm of brain, Neoplasm of the breast, Glioblastoma, Hepatocellular carcinoma, Pancreatic adenocarcinoma, Transitional cell carcinoma of the bladder, Carcinoma of esophagus, Colorectal Neoplasms, Uterine cervical neoplasms, Adenocarcinoma of stomach, Ovarian Serous Cystadenocarcinoma, Malignant neoplasm of body of uterus, Uterine Carcinosarcoma, Li-Fraumeni syndrome, Liver cancer, Hepatocellular carcinoma, Hereditary cancer-predisposing syndrome, Liver cancer, Malignant melanoma of skin, Multiple myeloma, Squamous cell carcinoma of the head and neck, Lung adenocarcinoma, Breast cancer, somatic, Squamous cell lung carcinoma, Neoplasm of brain, Neoplasm of the breast, Hepatocellular carcinoma, Breast adenocarcinoma, Hereditary cancer-predisposing syndrome, Pancreatic adenocarcinoma, Transitional cell carcinoma of the bladder, Carcinoma of esophagus, Colorectal Neoplasms, Adenoid cystic carcinoma, Adenocarcinoma of stomach, Ovarian Serous Cystadenocarcinoma, Malignant neoplasm of body of uterus, Uterine Carcinosarcoma, Carcinoma of pancreas, Dyskeratosis congenita, autosomal recessive, Leber congenital amaurosis, Cone-rod dystrophy, Autosomal recessive congenital ichthyosis, Ichthyosis, Autosomal recessive congenital ichthyosis, Spondylocostal dysostosis, Inclusion Body Myopathy, Dominant, Hepatic failure, early-onset, and neurologic disorder due to cytochrome C oxidase deficiency, Charcot-Marie-Tooth disease and deafness, Dejerine-Sottas disease, Dejerine-Sottas disease, Dejerine-Sottas syndrome, autosomal dominant, Charcot-Marie-Tooth disease, type IA, Dejerine-Sottas syndrome, autosomal dominant, Charcot-Marie-Tooth disease, type I, Mitochondrial complex III deficiency, nuclear type 2, Common variable immunodeficiency, Immunoglobulin A deficiency, Common Variable Immune Deficiency, Dominant, Common variable immunodeficiency, Hereditary cancer-predisposing syndrome, Multiple fibrofolliculomas, Hereditary cancer-predisposing syndrome, Hereditary cancer-predisposing syndrome, Multiple fibrofolliculomas, Hereditary cancer-predisposing syndrome, Smith-Magenis syndrome, Joubert syndrome, Meckel-Gruber syndrome, Sjögren-Larsson syndrome, Congenital disorders of glycosylation type II, Congenital disorder of glycosylation IIp, Congenital defect of folate absorption, Immunodeficiency, Cone-Rod Dystrophy, Dominant, Neurofibromatosis, type 1, Hereditary cancer-predisposing syndrome, Breast-ovarian cancer, familial 4, Hereditary cancer-predisposing syndrome, Infantile Refsum's disease, Peroxisome biogenesis disorders, Zellweger syndrome spectrum, Peroxisome biogenesis disorder, Familial hypoplastic, glomerulocystic kidney, Limb-girdle muscular dystrophy, type 2G, Hyperphosphatasia with mental retardation syndrome, Neoplasm of the breast, Transitional cell carcinoma of the bladder, Carcinoma of esophagus, Uterine cervical neoplasms, Adenocarcinoma of stomach, Neoplasm of the breast, Colorectal Neoplasms, Adenocarcinoma of stomach, Hypothyroidism, congenital, nongoitrous, Autosomal recessive woolly hair, Autosomal Recessive Hypotrichosis with Woolly Hair, Bullous ichthyosiform erythroderma, Meesman's corneal dystrophy, Dermatopathia pigmentosa reticularis, Naxos disease, Ciliary dyskinesia, primary, Autoimmune disease, multisystem, infantile-onset, Mucopolysaccharidosis, MPS-III-B, Glycogen storage disease type 1A, Breast-ovarian cancer, familial, Breast-ovarian cancer, familial, Hereditary breast and ovarian cancer syndrome, Breast-ovarian cancer, familial 1, Hereditary breast and ovarian cancer syndrome, Hereditary cancer-predisposing syndrome, Familial cancer of breast, Hereditary cancer-predisposing syndrome, Breast-ovarian cancer, familial, Hereditary breast and ovarian cancer syndrome, Breast-ovarian cancer, familial, Familial cancer of breast, Breast-ovarian cancer, familial 1, Hereditary breast and ovarian cancer syndrome, Neoplasm of the breast, Hereditary cancer-predisposing syndrome, Breast-ovarian cancer, familial, Hereditary breast and ovarian cancer syndrome, Hereditary cancer-predisposing syndrome, Breast-ovarian cancer, familial, Hereditary breast and ovarian cancer syndrome, Hereditary breast and ovarian cancer syndrome, Hereditary cancer-predisposing syndrome, Familial cancer of breast, Breast-ovarian cancer, familial, Hereditary breast and ovarian cancer syndrome, Hereditary cancer-predisposing syndrome, Neoplasm of the breast, Renal tubular acidosis, autosomal dominant, Frontotemporal dementia, ubiquitin-positive, Growth and mental retardation, mandibulofacial dysostosis, microcephaly, and cleft palate, Alexander's disease, Progressive supranuclear ophthalmoplegia, Frontotemporal dementia, Progressive supranuclear ophthalmoplegia, Muscular dystrophy, Epilepsy, progressive myoclonic 6, Glanzmann thrombasthenia, Amelogenesis imperfecta, type IV, Tricho-dento-osseous syndrome, Osteogenesis imperfecta type I, Osteogenesis imperfecta type 2, thin-bone, Osteogenesis imperfecta with normal sclerae, dominant form, Osteogenesis imperfecta type I, Osteogenesis imperfecta type IIC, Osteogenesis imperfecta, recessive perinatal lethal, Osteogenesis imperfecta type I, Osteogenesis imperfecta with normal sclerae, dominant form, Osteogenesis imperfecta type III, Osteogenesis imperfecta, type III/iv, Osteogenesis imperfecta, recessive perinatal lethal, Osteogenesis imperfecta with normal sclerae, dominant form, Osteogenesis imperfecta type 1, mild, Proximal symphalangism, Tarsal carpal coalition syndrome, Joubert syndrome, Joubert syndrome, Fanconi anemia, complementation group O, Hereditary cancer-predisposing syndrome, Fanconi anemia, complementation group O, Retinitis pigmentosa, Ischiopatellar dysplasia, Familial cancer of breast, Fanconi anemia, complementation group J, Neoplasm of ovary, Hereditary breast and ovarian cancer syndrome, Hereditary cancer-predisposing syndrome, Hereditary cancer-predisposing syndrome, Familial cancer of breast, Fanconi anemia, complementation group J, Hereditary cancer-predisposing syndrome, Hereditary breast and ovarian cancer syndrome, Hereditary cancer-predisposing syndrome, Rolandic epilepsy, Isolated growth hormone deficiency type 1B, Hyperkalemic Periodic Paralysis Type 1, Potassium aggravated myotonia, Paramyotonia congenita of von Eulenburg, Paramyotonia congenita/hyperkalemic periodic paralysis, Hyperkalemic Periodic Paralysis Type 1, Hypokalemic periodic paralysis, Hypokalemic periodic paralysis, type 2, Hyperkalemic Periodic Paralysis Type 1, Carcinoma of colon, Oligodontia-colorectal cancer syndrome, Carney complex, type 1, Andersen Tawil syndrome, Familial periodic paralysis, Andersen Tawil syndrome, Andersen Tawil syndrome, Congenital long QT syndrome, Acampomelic campomelic dysplasia, Camptomelic dysplasia, Striatal necrosis, bilateral, and progressive polyneuropathy, Pontocerebellar hypoplasia type 4, Pontocerebellar hypoplasia type 2A, Pontocerebellar hypoplasia type 4, Pontocerebellar hypoplasia type 2A, Pontocerebellar hypoplasia type 5, Congenital cerebellar hypoplasia, Hypertonia, Microcephaly, Amblyopia, Global developmental delay, Olivopontocerebellar hypoplasia, Non-syndromic pontocerebellar hypoplasia, Olivopontocerebellar hypoplasia, Deficiency of galactokinase, Hemophagocytic lymphohistiocytosis, familial, Pseudoneonatal adrenoleukodystrophy, Epidermodysplasia verruciformis, Desbuquois dysplasia, Rolandic epilepsy, Ciliary dyskinesia, Ciliary dyskinesia, primary, Glycogen storage disease, type II, Glycogen storage disease type II, infantile, Glycogen storage disease, type II, Baraitser-Winter Syndrome, Nephrotic syndrome, type 8, Autosomal recessive cutis laxa type 2B, Encephalopathy, progressive, early-onset, with brain atrophy and thin corpus callosum, Arhinia choanal atresia microphthalmia, Oculomelic amyoplasia, Dystonia, Spinocerebellar ataxia, ACTH resistance, Glucocorticoid Deficiency, Renal hypodysplasia/aplasia, Left ventricular noncompaction, Pancreatic agenesis and congenital heart disease, Abnormality of cardiovascular system morphology, Congenital diaphragmatic hernia, Seckel syndrome, Niemann-Pick disease type C1, Niemann-Pick disease type C1, Niemann-Pick disease, type D, Scalp ear nipple syndrome, Arrhythmogenic right ventricular cardiomyopathy, type 10, Arrhythmogenic right ventricular cardiomyopathy, Cardiovascular phenotype, Arrhythmogenic right ventricular cardiomyopathy, type 10, Amyloidogenic transthyretin amyloidosis, Cardiovascular phenotype, Bainbridge-Ropers syndrome, Mental retardation, autosomal recessive, Vici syndrome, Carcinoma of pancreas, Juvenile polyposis syndrome, Colorectal Neoplasms, Juvenile polyposis/hereditary hemorrhagic telangiectasia syndrome, Juvenile polyposis syndrome, Colorectal Neoplasms, Mirror movements, Carcinoma of colon, Pitt-Hopkins syndrome, Erythropoietic protoporphyria, Progressive intrahepatic cholestasis, Periventricular nodular heterotopia with syndactyly, cleft palate and developmental delay, Periventricular nodular heterotopia, Immunodeficiency, Obesity, Schizophrenia, Obesity, Osteopetrosis autosomal recessive, Burn-McKeown syndrome, Severe congenital neutropenia autosomal dominant, Cyclical neutropenia, Complement factor d deficiency, Spondylometaphyseal dysplasia Sedaghatian type, Carcinoma of pancreas, Peutz-Jeghers syndrome, Hereditary cancer-predisposing syndrome, Hereditary cancer-predisposing syndrome, Cutaneous malignant melanoma, Cutaneous melanoma, Persistent mullerian duct syndrome, type I, Preimplantation embryonic lethality, Hypocalcemia, autosomal dominant, Cone-rod dystrophy, Age-related macular degeneration, Spinocerebellar ataxia, Cardiofaciocutaneous syndrome, Cardio-facio-cutaneous syndrome, CODAS syndrome, Leukodystrophy, hypomyelinating, Insulin-resistant diabetes mellitus and acanthosis nigricans, Pineal hyperplasia and diabetes mellitus syndrome, Insulin-resistant diabetes mellitus and acanthosis nigricans, Leprechaunism syndrome, Pineal hyperplasia and diabetes mellitus syndrome, Retinitis pigmentosa, Mucolipidosis type IV, Mucolipidosis type IV, Mucolipidosis type IV, Boucher Neuhauser syndrome, Weill-Marchesani syndrome, Cerebellar ataxia, deafness and narcolepsy, autosomal dominant, Tyrosine kinase 2 deficiency, Charcot-Marie-Tooth disease, type 2M, Familial hypercholesterolemia, Familial hypercholesterolemias, Kartagener syndrome, Ciliary dyskinesia, primary, Spondyloenchondrodysplasia with immune dysregulation, Deficiency of alpha-mannosidase, Aicardi Goutieres syndrome, Blood group—Lutheran inhibitor, Glutaric aciduria, type 1, Marshall-Smith syndrome, Epileptic encephalopathy, early infantile, Familial hemiplegic migraine type 1, Episodic ataxia type 2, Epileptic encephalopathy, early infantile, Familial hemiplegic migraine type 1, Autosomal recessive non-syndromic intellectual disability, Lehman syndrome, Cerebral autosomal dominant arteriopathy with subcortical infarcts and leukoencephalopathy, Combined oxidative phosphorylation deficiency, Severe combined immunodeficiency, autosomal recessive, T cell-negative, B cell-positive, NK cell-negative, Thyroid dyshormonogenesis, Cold-induced sweating syndrome, Pseudoachondroplastic spondyloepiphyseal dysplasia syndrome, Multiple epiphyseal dysplasia, Pseudoachondroplastic spondyloepiphyseal dysplasia syndrome, Epiphyseal dysplasia, multiple, severe, Bilateral right-sidedness sequence, Transposition of the great arteries, dextro-looped, Heterotaxia, Acute myeloid leukemia, Arthrogryposis multiplex congenita, neurogenic, with myelin defect, Hemochromatosis type 1, Dystonia 28, childhood-onset, Finnish congenital nephrotic syndrome, Central core disease, Central core disease, Malignant hyperthermia, susceptibility to, RYR1-Related Disorders, Congenital myopathy with fiber type disproportion, RYR1-Related Disorders, Myopathy, Congenital myopathy with fiber type disproportion, Central core disease, Malignant hyperthermia, susceptibility to, Central core disease, Congenital myopathy with fiber type disproportion, Central core disease, Cutis laxa with severe pulmonary, gastrointestinal, and urinary abnormalities, Nephrotic syndrome, type 9, Maple syrup urine disease, Diamond-Blackfan anemia, Alternating hemiplegia of childhood, Dystonia, Familial partial lipodystrophy 6, Ethylmalonic encephalopathy, Blood group—Lutheran Null, Familial type 3 hyperlipoproteinemia, Apolipoprotein C2 deficiency, Apolipoprotein C-II (Padova), Apolipoprotein C2 deficiency, Apolipoprotein C-II (Auckland), Immunodeficiency, Hermansky-Pudlak syndrome, Xeroderma pigmentosum, group D, Trichothiodystrophy, photosensitive, Congenital muscular dystrophy-dystroglycanopathy with mental retardation, type B5, Muscular dystrophy-dystroglycanopathy (congenital with brain and eye anomalies), type a, Congenital muscular dystrophy-dystroglycanopathy (with or without mental retardation) type B5, Limb-girdle muscular dystrophy-dystroglycanopathy, type C5, Limb-girdle muscular dystrophy, Congenital muscular dystrophy-dystroglycanopathy with brain and eye anomalies type A5, Muscle weakness, Headache, Gait imbalance, Difficulty walking, Paresthesia, Difficulty climbing stairs, Scapular winging, Difficulty standing, Muscular dystrophy-dystroglycanopathy, Walker-Warburg congenital muscular dystrophy, Congenital muscular dystrophy-dystroglycanopathy with mental retardation, type B5, Limb-girdle muscular dystrophy-dystroglycanopathy, type C5, Walker-Warburg congenital muscular dystrophy, Walker-Warburg congenital muscular dystrophy, Congenital muscular dystrophy-dystroglycanopathy without mental retardation, type B5, Walker-Warburg congenital muscular dystrophy, Congenital muscular dystrophy-dystroglycanopathy with mental retardation, type B5, Limb-girdle muscular dystrophy-dystroglycanopathy, type C5, Congenital muscular dystrophy-dystroglycanopathy with mental retardation, type B5, Congenital muscular dystrophy-dystroglycanopathy with brain and eye anomalies type A5, Walker-Warburg congenital muscular dystrophy, Hypocalciuric hypercalcemia, familial, type III, Mental retardation, autosomal recessive, Hyperferritinemia cataract syndrome, L-ferritin deficiency, autosomal recessive, Isolated lutropin deficiency, Autistic disorder of childhood onset, Motor delay, Iris coloboma, Autism, Delayed speech and language development, Abnormality of vision, Early infantile epileptic encephalopathy, Ataxia-oculomotor apraxia, Early infantile epileptic encephalopathy, Peripheral neuropathy, myopathy, hoarseness, and hearing loss, Spinocerebellar ataxia, Spinocerebellar ataxia, Retinitis pigmentosa, Nemaline myopathy, Polyglucosan body myopathy with or without immunodeficiency, Glycogen storage disease, type IV, Brown-Vialetto-Van Laere syndrome, Spinocerebellar ataxia, Cerebro-costo-mandibular syndrome, Neurohypophyseal diabetes insipidus, Pigmentary pallidal degeneration, Hypoprebetalipoproteinemia, acanthocytosis, retinitis pigmentosa, and pallidal degeneration, Pigmentary pallidal degeneration, Spongiform encephalopathy with neuropsychiatric features, Genetic prion diseases, Gerstmann-Straussler-Scheinker syndrome, Cerebral Amyloid Angiopathy, PRNP-related, Ataxia-telangiectasia-like disorder, Kindler's syndrome, Short stature, facial dysmorphism, and skeletal anomalies with or without cardiac anomalies, Auriculocondylar syndrome, McKusick Kaufman syndrome, Alagille syndrome, Mitochondrial complex I deficiency, Leigh syndrome, Congenital dyserythropoietic anemia, type II, Cowden syndrome, Congenital dyserythropoietic anemia, Retinitis pigmentosa, Otofaciocervical syndrome, Thrombophilia due to thrombomodulin defect, Thrombophilia due to thrombomodulin defect, Joint laxity, short stature, and myopia, Craniofacial anomalies and anterior segment dysgenesis syndrome, Familial hypertrophic cardiomyopathy, Cardiomyopathy, hypertrophic, midventricular, digenic, Dowling-Degos disease, C-like syndrome, Multiple synostoses syndrome, Symphalangism, proximal, Fibular hypoplasia and complex brachydactyly, schizophrenia, Aicardi Goutieres syndrome, Severe combined immunodeficiency due to ADA deficiency, Partial adenosine deaminase deficiency, Multiple congenital anomalies-hypotonia-seizures syndrome, Primary autosomal recessive microcephaly, Galloway-Mowat Syndrome, Arterial tortuosity syndrome, Epileptic encephalopathy, early infantile, Helsmoortel-van der aa syndrome, Congenital disorder of glycosylation type 1E, Idiopathic hypercalcemia of infancy, Cushing's syndrome, McCune-Albright syndrome, Polyostotic fibrous dysplasia, somatic, mosaic, Pituitary Tumor, Growth Hormone-Secreting, Somatic, Liver cancer, McCune-Albright syndrome, Malignant melanoma of skin, Squamous cell carcinoma of the head and neck, Lung adenocarcinoma, Neoplasm of the breast, Hepatocellular carcinoma, Pancreatic adenocarcinoma, Neoplasm, Colorectal Neoplasms, Uterine cervical neoplasms, Adrenocortical carcinoma, Adenocarcinoma of stomach, McCune-Albright syndrome, Pseudohypoparathyroidism, type IA, with testotoxicosis, Pseudohypoparathyroidism type 1C, Waardenburg syndrome type 4B, Early infantile epileptic encephalopathy, Benign familial neonatal seizures, Early infantile epileptic encephalopathy, Seizures, Generalized hypotonia, Early infantile epileptic encephalopathy, Benign familial neonatal seizures, Dyskeratosis congenita, autosomal recessive, Pulmonary fibrosis and/or bone marrow failure, telomere-related, Dyskeratosis congenita, Dyskeratosis congenita, autosomal recessive, Dyskeratosis congenita, autosomal recessive, Glomerulonephritis with sparse hair and telangiectases, Alzheimer disease, type 1, Amyotrophic lateral sclerosis type 1, Inflammatory bowel disease, autosomal recessive, Immunodeficiency, Familial platelet disorder with associated myeloid malignancy, Familial platelet disorder with associated myeloid malignancy, Transient myeloproliferative disorder of Down syndrome, Leukemia, acute myeloid, m0 subtype, Popliteal pterygium syndrome lethal type, Kartagener syndrome, Primary ciliary dyskinesia, Kartagener syndrome, Ciliary dyskinesia, Primary ciliary dyskinesia, Homocystinuria due to CBS deficiency, Epileptic encephalopathy, early infantile, Unverricht-Lundborg syndrome, Autoimmune polyglandular syndrome type 1, autosomal dominant, Leukocyte adhesion deficiency type 1, Bethlem myopathy, Ullrich congenital muscular dystrophy, Ullrich congenital muscular dystrophy, Microcephalic osteodysplastic primordial dwarfism type 2, Polyarteritis nodosa, childhoood-onset, Peroxisome biogenesis disorder, Proline dehydrogenase deficiency, Schizophrenia, Autosomal recessive Noonan-like syndrome due to compound heterozygous variants in LZTR1, Spinal muscular atrophy, jokela type, Frontotemporal dementia and/or amyotrophic lateral sclerosis, Myopathy, isolated mitochondrial, autosomal dominant, Rhabdoid tumor predisposition syndrome, Schwannomatosis, Deficiency of beta-ureidopropionase, Congenital cataract, Klippel-feil syndrome, autosomal recessive, with nemaline myopathy and facial dysmorphism, Hermansky-Pudlak syndrome, Cataract, congenital nuclear, autosomal recessive, Cataract, multiple types, Familial cancer of breast, Hereditary cancer-predisposing syndrome, Hereditary cancer-predisposing syndrome, Familial cancer of breast, Prostate cancer, somatic, Hereditary cancer-predisposing syndrome, Osteosarcoma, Neurofibromatosis, type 2, Epilepsy, familial focal, with variable foci, Rolandic epilepsy, Parkinson disease, Sorsby fundus dystrophy, Macrothrombocytopenia and granulocyte inclusions with or without nephritis or sensorineural hearing loss, Microcytic anemia, Peripheral demyelinating neuropathy, central dysmyelination, Waardenburg syndrome, and Hirschsprung disease, Waardenburg syndrome type 4C, Parkinson disease, Infantile neuroaxonal dystrophy, Adenylosuccinate lyase deficiency, Nephronophthisis-like nephropathy, Carcinoma of colon, Rubinstein-Taybi syndrome, Carcinoma of colon, Kanzaki disease, Methemoglobinemia type 2, Autosomal recessive syndrome of syndactyly, undescended testes and central nervous system defects, Megalencephalic leukoencephalopathy with subcortical cysts, Microcephaly with chorioretinopathy, autosomal recessive, Mitochondrial DNA depletion syndrome (MNGIE type), Muscular dystrophy, congenital, megaconial type, Metachromatic leukodystrophy, juvenile type, Metachromatic leukodystrophy, late infantile, Metachromatic leukodystrophy, Metachromatic leukodystrophy, severe, Metachromatic leukodystrophy, Short stature, idiopathic, X-linked, Leri Weill dyschondrosteosis, Chondrodysplasia punctata, X-linked recessive, Kallmann syndrome, Ocular albinism, type I, Opitz-Frias syndrome, Amelogenesis imperfecta, type 1E, Spondyloepiphyseal dysplasia tarda, Oral-facial-digital syndrome, Joubert syndrome, Joubert syndrome, Oral-facial-digital syndrome, Paroxysmal nocturnal hemoglobinuria 1, Multiple congenital anomalies-hypotonia-seizures syndrome, Pettigrew syndrome, Nance-Horan syndrome, Congenital cataract, Early infantile epileptic encephalopathy, Early infantile epileptic encephalopathy, Atypical Rett syndrome, Early infantile epileptic encephalopathy, Angelman syndrome-like, Early infantile epileptic encephalopathy, Atypical Rett syndrome, Early infantile epileptic encephalopathy, Angelman syndrome-like, Early infantile epileptic encephalopathy, Atypical Rett syndrome, Early infantile epileptic encephalopathy, Angelman syndrome-like, Juvenile retinoschisis, Glycogen storage disease type IXa1, Coffin-Lowry syndrome, Deafness, X-linked, IFAP syndrome with or without BRESHECK syndrome, Familial X-linked hypophosphatemic vitamin D refractory rickets, Hydranencephaly with abnormal genitalia, Proud Levine Carpenter syndrome, Lissencephaly, X-linked, epileptic encephalopathy, early infanitle, Mental retardation, X-linked, Congenital adrenal hypoplasia, X-linked, Becker muscular dystrophy, Duchenne muscular dystrophy, Becker muscular dystrophy, Duchenne muscular dystrophy, Dilated cardiomyopathy, Granulomatous disease, chronic, X-linked, variant, Cone-rod dystrophy, X-linked, Retinitis pigmentosa, Ornithine carbamoyltransferase deficiency, Mental retardation, X-linked, Mental retardation, X-linked, Congenital stationary night blindness, type 1A, Mental retardation and microcephaly with pontine and cerebellar hypoplasia, FG syndrome, Monoamine oxidase A deficiency, Atrophia bulborum hereditaria, Familial exudative vitreoretinopathy, X-linked, Atrophia bulborum hereditaria, Kabuki syndrome, Retinitis pigmentosa, Arthrogryposis multiplex congenita, distal, X-linked, Properdin deficiency, X-linked, Chondrodysplasia punctata, X-linked dominant, atypical, Chondrodysplasia punctata X-linked dominant, MEND syndrome, Wiskott-Aldrich syndrome, GATA-1-related thrombocytopenia with dyserythropoiesis, Dyserythropoietic anemia with thrombocytopenia, GATA-1-related thrombocytopenia with dyserythropoiesis, Neurodegeneration with brain iron accululation, Nephrolithiasis, X-linked recessive, Dent disease, Mental retardation, syndromic, Claes-Jensen type, X-linked, 2-methyl-3-hydroxybutyric aciduria, Aarskog syndrome, Hereditary sideroblastic anemia, Amyotrophic lateral sclerosis, with or without frontotemporal dementia, Androgen resistance syndrome, Partial androgen insensitivity syndrome, Prostate cancer susceptibility, Androgen resistance syndrome, Partial androgen insensitivity syndrome, Craniofrontonasal dysplasia, Hypohidrotic X-linked ectodermal dysplasia, Hypohidrotic ectodermal dysplasia, Tooth agenesis, selective, X-linked, Myopia, X-Linked, Female-Limited, X-linked severe combined immunodeficiency, Ohdo syndrome, X-linked, FG syndrome, Intellectual functioning disability, Cardiovascular phenotype, X-linked hereditary motor and sensory neuropathy, Mental retardation, X-linked, syndromic, Mental Retardation, X-Linked, Cornelia de Lange syndrome 5, Glycogen storage disease, Allan-Herndon-Dudley syndrome, Mental retardation, X-linked, Metacarpal 4-5 fusion, ATR-X syndrome, Menkes kinky-hair syndrome, Menkes kinky-hair syndrome, Cutis laxa, X-linked, Distal spinal muscular atrophy, X-linked, Phosphoglycerate kinase 1 deficiency, Cleft palate with ankyloglossia, Mental retardation, X-linked, Choroideremia, Early infantile epileptic encephalopathy, Mohr-Tranebjaerg syndrome, X-linked agammaglobulinemia, Agammaglobulinemia, non-Bruton type, Fabry disease, Fabry disease, Deoxygalactonojirimycin response, Pelizaeus-Merzbacher disease, Pelizaeus-Merzbacher disease, connatal, Thyroxine-binding globulin, variant P, Phosphoribosylpyrophosphate synthetase superactivity, Charcot-Marie-Tooth disease, X-linked recessive, type 5, Alport syndrome, X-linked recessive, Microscopic hematuria, Elevated mean arterial pressure, Chronic kidney disease, Mental retardation, X-linked, Megalocornea, Mental retardation, X-linked, Heterotopia, Lissencephaly, X-linked, Fucosidosis, Lissencephaly, X-linked, Subcortical laminar heterotopia, X-linked, Danon disease, Syndromic X-linked mental retardation, Cabezas type, Mental retardation, X-linked, syndromic, wu type, Lymphoproliferative syndrome, X-linked, Lymphoproliferative syndrome, X-linked, Simpson-Golabi-Behmel syndrome, Borjeson-Forssman-Lehmann syndrome, Lesch-Nyhan syndrome, Lesch-Nyhan syndrome, HPRT Flint, Partial hypoxanthine-guanine phosphoribosyltransferase deficiency, HPRT Munich, HPRT Milwaukee, Lesch-Nyhan syndrome, Christianson syndrome, Hypertrophic cardiomyopathy, Myopathy, reducing body, X-linked, early-onset, severe, Immunodeficiency with hyper IgM type 1, Pituitary adenoma, growth hormone-secreting, Heterotaxy, visceral, X-linked, VACTERL association with hydrocephaly, X-linked, Congenital heart defects, nonsyndromic, Heterotaxy, visceral, X-linked, Hereditary factor IX deficiency disease, Hereditary factor IX deficiency disease, Thrombophilia, X-linked, due to factor IX defect, Mucopolysaccharidosis, MPS-II, Mucopolysaccharidosis, type II, severe form, Mucopolysaccharidosis, MPS-II, Hypospadias, X-linked, Severe X-linked myotubular myopathy, Child syndrome, Spondyloepimetaphyseal dysplasia X-linked, Microcephaly, Carious teeth, Intellectual disability, Global developmental delay, Abnormality of the cerebral cortex, Skeletal muscle atrophy, Oral-pharyngeal dysphagia, Muscular hypotonia, Muscular hypotonia, Creatine deficiency, X-linked, Chromosome Xq28 deletion syndrome, Adrenoleukodystrophy, Nephrogenic diabetes insipidus, X-linked, Nephrogenic syndrome of inappropriate antidiuresis, N-terminal acetyltransferase deficiency, Rett syndrome, Mental retardation, X-linked, syndromic, Rett syndrome, Rett syndrome, Stereotypy, Delayed speech and language development, Delayed gross motor development, Bruxism, Deuteranopia, Otopalatodigital spectrum disorder, Melnick-Needles syndrome, Periventricular nodular heterotopia, Melnick-Needles syndrome, Oto-palato-digital syndrome, type II, Frontometaphyseal dysplasia, Cardiac valvular dysplasia, X-linked, Periventricular nodular heterotopia, Oto-palato-digital syndrome, type II, Oto-palato-digital syndrome, type I, Emery-Dreifuss muscular dystrophy, X-linked, 3-Methylglutaconic aciduria type 2, Galloway-Mowat Syndrome, X-Linked, Glucose 6 phosphate dehydrogenase deficiency, G6pd a-, G6PD Canton, G6PD GIFU, G6PD Agrigento, G6PD Taiwan-Hakka, Anemia, nonspherocytic hemolytic, due to G6PD deficiency, G6PD LOMA Linda, Anemia, nonspherocytic hemolytic, due to G6PD deficiency, Glucose phosphate dehydrogenase deficiency, G6pd a-G6PD Gastonia, G6PD Marion, G6PD Minnesota, Anemia, nonspherocytic hemolytic, due to G6PD deficiency, Hypohidrotic ectodermal dysplasia with immune deficiency, Dyskeratosis congenita X-linked, Hereditary factor VIII deficiency disease, Parkinsonism, early onset with mental retardation, Mental retardation, X-linked, Leri Weill dyschondrosteosis, XY sex reversal, type 1, Leigh syndrome, Chloramphenicol resistance, nonsyndromic sensorineural, mitochondrial, Leber's optic atrophy, Cytochrome c oxidase i deficiency, Leigh syndrome, Mitochondrial complex I deficiency, Leigh syndrome, Retinitis pigmentosa-deafness syndrome, Cerebellar ataxia, cataract, and diabetes mellitus.

[0365] Pathogenic T to G or A to C mutations may be corrected using the methods and compositions provided herein, for example by mutating the C to a T, and/or the G to an A, and thereby restoring gene function. Guide RNAs (gRNA) sequences, which encode RNA that can direct a napDNAbp, or any of the base editors provided herein, to a target site gRNA sequences may be cloned into an expression vector, such as Addgene pFYF1320 (which targets EGFP), to encode a gRNA that targets a napDNAbp, or any of the base editors provided herein, to a target site in order to correct a disease-related mutation.

[0366] In some aspects, the present disclosure provides uses of any one of the base editors described or evaluated by the systems herein, and a guide RNA targeting this base editor to a target C:G base pair in a nucleic acid molecule, in the manufacture of a kit for base editing, wherein the base editing comprises contacting the nucleic acid molecule with the base editor and guide RNA under conditions suitable for the substitution of the cytosine (C) of the C:G nucleobase pair with a thymine (T). In some embodiments of these uses, the nucleic acid molecule is a double-stranded DNA molecule. In some embodiments, the step of contacting of induces separation of the double-stranded DNA at a target region. In some embodiments, the step of contacting further comprises nicking one strand of the double-stranded DNA, wherein the one strand comprises an unmutated strand that comprises the G of the target C:G nucleobase pair.

[0367] In some embodiments of the described uses, the step of contacting is performed in vitro. In other embodiments, the step of contacting is performed in vivo. In some embodiments, the step of contacting is performed in a subject (e.g., a human subject or a non-human animal subject). In some embodiments, the step of contacting is performed in a cell, such as a human or non-human animal cell.

[0368] The present disclosure also provides uses of any one of the base editors described herein as a medicament. The present disclosure also provides uses of any one of the complexes of base editors and guide RNAs described herein as a medicament.

### Multiplexed Base Editing Applications

[0369] In some aspects, the present disclosure provides methods of editing multiple nucleic acid target sites using the disclosed cytosine base editors. In multiplexed base editing of unique genomic loci, a plurality of gRNAs having complementarity to different target sequences enables the formation of fusion protein-gRNA complexes at each of several (e.g. 5, 10, 15, 20, 25, or more) target sequences simulataneously, or within a single iteration or cycle.

[0370] The discovery and widespread implementation of the CRISPR/Cas system has dramatically expanded the toolbox for genome engineering and has revolutionized the future prospects of basic biological research, data storage in living systems, agricultural science, and medicine. An advantage of CRISPR/Cas-based genome editors over prior approaches is the capacity to multiplex by using several guide RNAs (gRNAs). This not only enables the screening of libraries of guides in a single cell population but also the targeting of up to six unique loci at once. However, the editing efficiency at each site tends to decrease when compared to that of a single guide transfection.

[0371] The present disclosure provides for methods of base editing comprising: contacting a nucleic acid molecule (e.g. DNA) with a plurality of complexes, wherein each complex comprises a base editor and a guide RNA (gRNA) bound to the napDNAbp domain of the base editor, wherein at least five of the fusion proteins of the plurality are each bound to a unique gRNA comprising a different guide sequence of at least 5, 7, or 10 contiguous nucleotides that is complementary to a target sequence in the genomic DNA of a eukaryotic cell. In certain embodiments, the plurality of the disclosed fusion protein-gRNA complexes make simultaneous edits (i.e., within a single iteration) at various target loci within a eukaryotic cell, e.g. a mammalian cell.

[0372] In some embodiments, the deamination efficiency at each unique genomic loci is substantially equivalent to that of a single guide transfection at each of these loci.

[0373] Any of the base editor-gRNA complexes provided herein may be introduced into the cell for multiplexed base editing in any suitable way, either stably or transiently. In some embodiments, a fusion protein may be transfected into the cell. In some embodiments, the cell may be transduced or transfected with a nucleic acid construct that encodes the fusion protein. For example, a cell may be transduced (e.g. with a virus encoding a fusion protein) or transfected (e.g. with a plasmid encoding a fusion protein) with a nucleic acid that encodes the fusion protein. Alternatively, a cell may be introduced with the fusion protein itself. Such transduction may be a stable or transient transduction. In some embodiments, cells expressing a base editing fusion protein, or comprising a fusion protein, may be transduced or transfected with one or more gRNA molecules, for example, when the fusion protein comprises a Cas9 (e.g. dCas9) domain. In some embodiments, a plasmid expressing a fusion protein may be introduced into cells through electroporation, transient (e.g. lipofection) or stable genome integration (e.g. piggybac), viral transduction, or other methods known to those of skill in the art.

[0374] In certain embodiments of the disclosed methods, the constructs that encode the fusion proteins are transfected into the cell separately from the constructs that encode the gRNAs. In certain embodiments, these components are encoded on a single construct and transfected together. In particular embodiments, these single constructs encoding the fusion proteins and gRNAs may be transfected into the cell iteratively, with each iteration associated with a subset of target sequences. In particular embodiments, these single constructs may be transfected into the cell over a period of days. In other embodiments, they may be transfected into the cell over a period of hours. In other embodiments, they may be transected into the cell over a period of weeks.

[0375] In the disclosed methods, target cells may be incubated with the fusion protein-gRNA complexes for two days, or 48 hours, after transfection to achieve multiplexed base editing. Target cells may be incubated for 30 hours, 40 hours, 54 hours, 60 hours, or 72 hours after transfection. Target cells may be incubated with the fusion protein-gRNA complexes for four days, five days, seven days, nine days, eleven days, or thirteen days or more after transfection.

[0376] In various embodiments, the step of contacting results in a base editing efficiency of at least about 35%, 40%, 50%, 60%, 70%, 80%, 85%, 90%, 95%, 98%, or 99%. The step of contacting may result in in a base editing efficiency of at least about 51%, 52%, 53%, 54%, 55%, 56% or 57%. In particular, the step of contacting results in base editing efficiencies of greater than 54%. In certain embodiments, base editing efficiencies of 99% may be realized.

[0377] In some aspects, the disclosure provides pharmaceutical compositions comprising a plurality of any of the base editors described herein and a gRNA, wherein at least five of the base editors of the plurality are each bound to a unique gRNA, and a pharmaceutically acceptable excipient.

### Pharmaceutical Compositions

[0378] Other aspects of the present disclosure relate to pharmaceutical compositions comprising any of the base editors or base editor-gRNA complexes described herein (e.g., including, but not limited to, the napDNAbps, base editors, guide RNAs, and complexes comprising base editors and guide RNAs).

[0379] The term “pharmaceutical composition”, as used herein, refers to a composition formulated for pharmaceutical use. In some embodiments, the pharmaceutical composition further comprises a pharmaceutically acceptable carrier. In some embodiments, the pharmaceutical composition comprises additional agents (e.g., for specific delivery, for targeted delivery, increasing half-life, or other therapeutic compounds).

[0380] In some embodiments, any of the base editors, gRNAs, and/or complexes described herein are provided as part of a pharmaceutical composition. In some embodiments, the pharmaceutical composition comprises any of the base editors provided herein. In some embodiments, the pharmaceutical composition comprises any of the complexes provided herein. In some embodiments pharmaceutical composition comprises a gRNA, a base editor, and a pharmaceutically acceptable excipient. Pharmaceutical compositions may optionally comprise one or more additional therapeutically active substances.

[0381] In some embodiments, compositions provided herein are formulated for delivery to a subject, for example, to a human subject, in order to effect a targeted genomic modification within the subject. In some embodiments, cells are obtained from the subject and contacted with a any of the pharmaceutical compositions provided herein. In some embodiments, cells removed from a subject and contacted ex vivo with a pharmaceutical composition are re-introduced into the subject, optionally after the desired genomic modification has been effected or detected in the cells. Methods of delivering pharmaceutical compositions comprising nucleases are known, and are described, for example, in U.S. Pat. Nos. 6,453,242; 6,503,717; 6,534,261; 6,599,692; 6,607,882; 6,689,558; 6,824,978; 6,933,113; 6,979,539; 7,013,219; 7,163,824, 9,526,784; 9,737,604; and U.S. Patent Publication Nos. 2018-0127780, published May 10, 2018, and 2018-0236081, published Aug. 23, 2018, the disclosures of all of which are incorporated by reference herein in their entireties. Although the descriptions of pharmaceutical compositions provided herein are principally directed to pharmaceutical compositions which are suitable for administration to humans, it will be understood by the skilled artisan that such compositions are generally suitable for administration to animals or organisms of all sorts. Modification of pharmaceutical compositions suitable for administration to humans in order to render the compositions suitable for administration to various animals is well understood, and the ordinarily skilled veterinary pharmacologist can design and/or perform such modification with merely ordinary, if any, experimentation. Subjects to which administration of the pharmaceutical compositions is contemplated include, but are not limited to, humans and/or other primates; mammals, domesticated animals, pets, and commercially relevant mammals such as cattle, pigs, horses, sheep, cats, dogs, mice, and/or rats; and/or birds, including commercially relevant birds such as chickens, ducks, geese, and/or turkeys.

[0382] Formulations of the pharmaceutical compositions described herein may be prepared by any method known or hereafter developed in the art of pharmacology. In general, such preparatory methods include the step of bringing the active ingredient(s) into association with an excipient and/or one or more other accessory ingredients, and then, if necessary and/or desirable, shaping and/or packaging the product into a desired single- or multi-dose unit.

[0383] Pharmaceutical formulations may additionally comprise a pharmaceutically acceptable excipient, which, as used herein, includes any and all solvents, dispersion media, diluents, or other liquid vehicles, dispersion or suspension aids, surface active agents, isotonic agents, thickening or emulsifying agents, preservatives, solid binders, lubricants and the like, as suited to the particular dosage form desired. Remington's The Science and Practice of Pharmacy, 21^{st} Edition, A. R. Gennaro (Lippincott, Williams & Wilkins, Baltimore, Md., 2006; incorporated in its entirety herein by reference) discloses various excipients used in formulating pharmaceutical compositions and known techniques for the preparation thereof. See also PCT application PCT/US2010/055131, filed Nov. 2, 2010 (Publication No. WO 2011/053982, published May 5, 2011), incorporated in its entirety herein by reference, for additional suitable methods, reagents, excipients and solvents for producing pharmaceutical compositions comprising a nuclease. Except insofar as any conventional excipient medium is incompatible with a substance or its derivatives, such as by producing any undesirable biological effect or otherwise interacting in a deleterious manner with any other component(s) of the pharmaceutical composition, its use is contemplated to be within the scope of this disclosure.

[0384] As used herein, the term “pharmaceutically acceptable carrier” means a pharmaceutically acceptable material, composition or vehicle, such as a liquid or solid filler, diluent, excipient, manufacturing aid (e.g., lubricant, talc magnesium, calcium or zinc stearate, or steric acid), or solvent encapsulating material, involved in carrying or transporting the compound from one site (e.g., the delivery site) of the body, to another site (e.g., organ, tissue or portion of the body). A pharmaceutically acceptable carrier is “acceptable” in the sense of being compatible with the other ingredients of the formulation and not injurious to the tissue of the subject (e.g., physiologically compatible, sterile, physiologic pH, etc.). Some examples of materials which can serve as pharmaceutically acceptable carriers include: (1) sugars, such as lactose, glucose and sucrose; (2) starches, such as corn starch and potato starch; (3) cellulose, and its derivatives, such as sodium carboxymethyl cellulose, methylcellulose, ethyl cellulose, microcrystalline cellulose and cellulose acetate; (4) powdered tragacanth; (5) malt; (6) gelatin; (7) lubricating agents, such as magnesium stearate, sodium lauryl sulfate and talc; (8) excipients, such as cocoa butter and suppository waxes; (9) oils, such as peanut oil, cottonseed oil, safflower oil, sesame oil, olive oil, corn oil and soybean oil; (10) glycols, such as propylene glycol; (11) polyols, such as glycerin, sorbitol, mannitol and polyethylene glycol (PEG); (12) esters, such as ethyl oleate and ethyl laurate; (13) agar; (14) buffering agents, such as magnesium hydroxide and aluminum hydroxide; (15) alginic acid; (16) pyrogen-free water; (17) isotonic saline; (18) Ringer's solution; (19) ethyl alcohol; (20) pH buffered solutions; (21) polyesters, polycarbonates and/or polyanhydrides; (22) bulking agents, such as polypeptides and amino acids (23) serum component, such as serum albumin, HDL and LDL; (22) C2-C12 alcohols, such as ethanol; and (23) other non-toxic compatible substances employed in pharmaceutical formulations. Wetting agents, coloring agents, release agents, coating agents, sweetening agents, flavoring agents, perfuming agents, preservative and antioxidants may also be present in the formulation. The terms such as “excipient”, “carrier”, “pharmaceutically acceptable carrier” or the like are used interchangeably herein.

[0385] Suitable routes of administering the pharmaceutical composition described herein include, without limitation: topical, subcutaneous, transdermal, intradermal, intralesional, intraarticular, intraperitoneal, intravesical, transmucosal, gingival, intradental, intracochlear, transtympanic, intraorgan, epidural, intrathecal, intramuscular, intravenous, intravascular, intraosseus, periocular, intratumoral, intracerebral, and intracerebroventricular administration.

[0386] In some embodiments, the pharmaceutical composition described herein is administered locally to a diseased site (e.g., a tumor site). In some embodiments, the pharmaceutical composition described herein is administered to a subject by injection, by means of a catheter, by means of a suppository, or by means of an implant, the implant being of a porous, non-porous, or gelatinous material, including a membrane, such as a sialastic membrane, or a fiber.

[0387] In some embodiments, the pharmaceutical composition is formulated in accordance with routine procedures as a composition adapted for intravenous or subcutaneous administration to a subject, e.g., a human. In some embodiments, pharmaceutical composition for administration by injection are solutions in sterile isotonic aqueous buffer. Where necessary, the pharmaceutical can also include a solubilizing agent and a local anesthetic such as lignocaine to ease pain at the site of the injection. Generally, the ingredients are supplied either separately or mixed together in unit dosage form, for example, as a dry lyophilized powder or water free concentrate in a hermetically sealed container such as an ampoule or sachette indicating the quantity of active agent. Where the pharmaceutical is to be administered by infusion, it can be dispensed with an infusion bottle containing sterile pharmaceutical grade water or saline. Where the pharmaceutical composition is administered by injection, an ampoule of sterile water for injection or saline can be provided so that the ingredients can be mixed prior to administration.

[0388] The pharmaceutical composition can be contained within a lipid particle or vesicle, such as a liposome or microcrystal, which is also suitable for parenteral administration. The particles can be of any suitable structure, such as unilamellar or plurilamellar, so long as compositions are contained therein. Compounds can be entrapped in “stabilized plasmid-lipid particles” (SPLP) containing the fusogenic lipid dioleoylphosphatidylethanolamine (DOPE), low levels (5-10 mol %) of cationic lipid, and stabilized by a polyethyleneglycol (PEG) coating (Zhang Y. P. et al., Gene Ther. 1999, 6:1438-47). Positively charged lipids such as N-[1-(2,3-dioleoyloxi)propyl]-N,N,N-trimethyl-amoniummethylsulfate, or “DOTAP,” are particularly preferred for such particles and vesicles. The preparation of such lipid particles is well known. See, e.g., U.S. Pat. Nos. 4,880,635; 4,906,477; 4,911,928; 4,917,951; 4,920,016; 4,921,757; 9,526,784, 9,737,604; and U.S. Patent Publication No. 2018-0127780, published May 10, 2018, each of which is incorporated herein by reference.

[0389] The pharmaceutical composition described herein may be administered or packaged as a unit dose, for example. The term “unit dose” when used in reference to a pharmaceutical composition of the present disclosure refers to physically discrete units suitable as unitary dosage for the subject, each unit containing a predetermined quantity of active material calculated to produce the desired therapeutic effect in association with the required diluent; i.e., carrier, or vehicle.

[0390] Further, the pharmaceutical composition can be provided as a pharmaceutical kit comprising (a) a container containing a compound of the invention in lyophilized form and (b) a second container containing a pharmaceutically acceptable diluent (e.g., sterile water) for injection. The pharmaceutically acceptable diluent can be used for reconstitution or dilution of the lyophilized compound of the invention. Optionally associated with such container(s) can be a notice in the form prescribed by a governmental agency regulating the manufacture, use or sale of pharmaceuticals or biological products, which notice reflects approval by the agency of manufacture, use or sale for human administration.

[0391] In another aspect, an article of manufacture containing materials useful for the treatment of the diseases described above is included. In some embodiments, the article of manufacture comprises a container and a label. Suitable containers include, for example, bottles, vials, syringes, and test tubes. The containers may be formed from a variety of materials such as glass or plastic. In some embodiments, the container holds a composition that is effective for treating a disease described herein and may have a sterile access port. For example, the container may be an intravenous solution bag or a vial having a stopper pierceable by a hypodermic injection needle. The active agent in the composition is a compound of the invention. In some embodiments, the label on or associated with the container indicates that the composition is used for treating the disease of choice. The article of manufacture may further comprise a second container comprising a pharmaceutically acceptable buffer, such as phosphate-buffered saline, Ringer's solution, or dextrose solution. It may further include other materials desirable from a commercial and user standpoint, including other buffers, diluents, filters, needles, syringes, and package inserts with instructions for use.

### Delivery Methods

[0392] In some aspects, the disclosure provides methods comprising delivering any of the base editors, gRNAs, and/or complexes described herein. In other embodiments, the disclosure provides methods comprising delivery of one or more vectors as described herein, one or more transcripts thereof, and/or one or proteins transcribed therefrom, to a host cell. In some embodiments, the invention further provides cells produced by such methods, and organisms (such as animals, plants, or fungi) comprising or produced from such cells. In some embodiments, a base editor as described herein in combination with (and optionally complexed with) a guide sequence is delivered to a cell. Conventional viral and non-viral based gene transfer methods can be used to introduce nucleic acids in mammalian cells or target tissues. Such methods can be used to administer nucleic acids encoding components of a base editor to cells in culture, or in a host organism. Non-viral vector delivery systems include ribonucleoprotein (RNP) complexes, DNA plasmids, RNA (e.g., a transcript of a vector described herein), naked nucleic acid, and nucleic acid complexed with a delivery vehicle, such as a liposome. Viral vector delivery systems include DNA and RNA viruses, which have either episomal or integrated genomes after delivery to the cell. For a review of gene therapy procedures, see Anderson, Science 256:808-813 (1992); Nabel & Felgner, TIBTECH 11:211-217 (1993); Mitani & Caskey, TIBTECH 11:162-166 (1993); Dillon, TIBTECH 11:167-175 (1993); Miller, Nature 357:455-460 (1992); Van Brunt, Biotechnology 6(10):1149-1154 (1988); Vigne, Restorative Neurology and Neuroscience 8:35-36 (1995); Kremer & Perricaudet, British Medical Bulletin 51(1):31-44 (1995); Haddada et al., in Current Topics in Microbiology and Immunology Doerfler and Bihm (eds) (1995); and Yu et al., Gene Therapy 1:13-26 (1994).

[0393] In some embodiments, the base editor and gRNA are delivered or administered as a protein:RNA complex. In certain embodiments, the method of delivery and vector provided herein is an RNP complex. RNP delivery of base editors markedly increases the DNA specificity of base editing. RNP delivery of base editors leads to decoupling of on- and off-target editing. RNP delivery ablated off-target editing at non-repetitive sites while maintaining on-target editing comparable to plasmid delivery, and greatly reduced off-target editing even at the highly repetitive VEGFA site 2. See Rees, H. A. et al., Improving the DNA specificity and applicability of base editing through protein engineering and protein delivery, Nat. Commun. 8, 15790 (2017), which is incorporated by reference herein in its entirety.

[0394] Methods of non-viral delivery of nucleic acids include RNP complexes, lipofection, nucleofection, microinjection, biolistics, virosomes, liposomes, immunoliposomes, polycation or lipid:nucleic acid conjugates, naked DNA, artificial virions, and agent-enhanced uptake of DNA. Lipofection is described in e.g., U.S. Pat. Nos. 5,049,386, 4,946,787; and 4,897,355) and lipofection reagents are sold commercially (e.g., Lipofectamine, Lipofectamine 2000, Lipofectamine 3000, Transfectam™ and Lipofectin™). In certain embodiments of the disclosed methods of editing and methods of evaluating off-target effects of base editors, a cationic lipid comprising Lipofectamine 2000 is used for delivery of nucleic acids to cells. Cationic and neutral lipids that are suitable for efficient receptor-recognition lipofection of polynucleotides include those of Feigner, WO 1991/17424 and WO 1991/16024. Delivery can be to cells (e.g., in vitro or ex vivo administration) or target tissues (e.g., in vivo administration).

[0395] The preparation of lipid:nucleic acid complexes, including targeted liposomes such as immunolipid complexes, is well known to one of skill in the art (see, e.g., Crystal, Science 270:404-410 (1995); Blaese et al., Cancer Gene Ther. 2:291-297 (1995); Behr et al., Bioconjugate Chem. 5:382-389 (1994); Remy et al., Bioconjugate Chem. 5:647-654 (1994); Gao et al., Gene Therapy 2:710-722 (1995); Ahmad et al., Cancer Res. 52:4817-4820 (1992); U.S. Pat. Nos. 4,186,183, 4,217,344, 4,235,871, 4,261,975, 4,485,054, 4,501,728, 4,774,085, 4,837,028, 4,946,787, 9,526,784, and 9,737,604).

[0396] The use of RNA or DNA viral based systems for the delivery of nucleic acids take advantage of highly evolved processes for targeting a virus to specific cells in the body and trafficking the viral payload to the nucleus. Viral vectors can be administered directly to patients (in vivo) or they can be used to treat cells in vitro, and the modified cells may optionally be administered to patients (ex vivo). Conventional viral based systems could include retroviral, lentivirus, adenoviral, adeno-associated and herpes simplex virus vectors for gene transfer. Integration in the host genome is possible with the retrovirus, lentivirus, and adeno-associated virus gene transfer methods, often resulting in long term expression of the inserted transgene. Additionally, high transduction efficiencies have been observed in many different cell types and target tissues.

[0397] The tropism of a viruses can be altered by incorporating foreign envelope proteins, expanding the potential target population of target cells. Lentiviral vectors are retroviral vectors that are able to transduce or infect non-dividing cells and typically produce high viral titers. Selection of a retroviral gene transfer system would therefore depend on the target tissue. Retroviral vectors are comprised of cis-acting long terminal repeats with packaging capacity for up to 6-10 kb of foreign sequence. The minimum cis-acting LTRs are sufficient for replication and packaging of the vectors, which are then used to integrate the therapeutic gene into the target cell to provide permanent transgene expression. Widely used retroviral vectors include those based upon murine leukemia virus (MuLV), gibbon ape leukemia virus (GaLV), Simian Immuno deficiency virus (SIV), human immuno deficiency virus (HIV), and combinations thereof (see, e.g., Buchscher et al., J. Virol. 66:2731-2739 (1992); Johann et al., J. Virol. 66:1635-1640 (1992); Sommnerfelt et al., Virol. 176:58-59 (1990); Wilson et al., J. Virol. 63:2374-2378 (1989); Miller et al., J. Virol. 65:2220-2224 (1991); PCT/US94/05700). In applications where transient expression is preferred, adenoviral based systems may be used. Adenoviral based vectors are capable of very high transduction efficiency in many cell types and do not require cell division. With such vectors, high titer and levels of expression have been obtained. This vector can be produced in large quantities in a relatively simple system. Adeno-associated virus (“AAV”) vectors may also be used to transduce cells with target nucleic acids, e.g., in the in vitro production of nucleic acids and peptides, and for in vivo and ex vivo gene therapy procedures (see, e.g., West et al., Virology 160:38-47 (1987); U.S. Pat. No. 4,797,368; WO 93/24641; Kotin, Human Gene Therapy 5:793-801 (1994); Muzyczka, J. Clin. Invest. 94:1351 (1994). Construction of recombinant AAV vectors are described in a number of publications, including U.S. Pat. No. 5,173,414; Tratschin et al., Mol. Cell. Biol. 5:3251-3260 (1985); Tratschin, et al., Mol. Cell. Biol. 4:2072-2081 (1984); Hermonat & Muzyczka, PNAS 81:6466-6470 (1984); and Samulski et al., J. Virol. 63:03822-3828 (1989).

[0398] Packaging cells are typically used to form virus particles that are capable of infecting a host cell. Such cells include 293 cells, which package adenovirus, and ψ2 cells or PA317 cells, which package retrovirus. Viral vectors used in gene therapy are usually generated by producing a cell line that packages a nucleic acid vector into a viral particle. The vectors typically contain the minimal viral sequences required for packaging and subsequent integration into a host, other viral sequences being replaced by an expression cassette for the polynucleotide(s) to be expressed. The missing viral functions are typically supplied in trans by the packaging cell line. For example, AAV vectors used in gene therapy typically only possess ITR sequences from the AAV genome which are required for packaging and integration into the host genome. Viral DNA is packaged in a cell line, which contains a helper plasmid encoding the other AAV genes, namely rep and cap, but lacking ITR sequences. The cell line may also be infected with adenovirus as a helper. The helper virus promotes replication of the AAV vector and expression of AAV genes from the helper plasmid. The helper plasmid is not packaged in significant amounts due to a lack of ITR sequences. Contamination with adenovirus can be reduced by, e.g., heat treatment to which adenovirus is more sensitive than AAV. Additional methods for the delivery of nucleic acids to cells are known to those skilled in the art. Reference is made to US 2003-0087817, published May 8, 2003, International Patent Application No. WO 2016/205764, published Dec. 22, 2016, International Patent Application No. WO 2018/071868, published Apr. 19, 2018, U.S. Patent Publication No. 2018/0127780, published May 10, 2018, and International Patent Application No. PCT/US2020/033873, the disclosures of each of which are incorporated herein by reference.

[0399] In various embodiments, the disclosed expression constructs may be engineered for delivery in one or more rAAV vectors. An rAAV as related to any of the methods and compositions provided herein may be of any serotype including any derivative or pseudotype (e.g., 1, 2, 3, 4, 5, 6, 7, 8, 9, 10, 11, 12, 13, 2/1, 2/5, 2/8, 2/9, 3/1, 3/5, 3/8, or 3/9). An rAAV may comprise a genetic load (i.e., a recombinant nucleic acid vector that expresses a gene of interest, such as a whole or split base editors that is carried by the rAAV into a cell) that is to be delivered to a cell. An rAAV may be chimeric.

[0400] As used herein, the serotype of an rAAV refers to the serotype of the capsid proteins of the recombinant virus. Non-limiting examples of derivatives and pseudotypes include rAAV2/1, rAAV2/5, rAAV2/8, rAAV2/9, AAV2-AAV3 hybrid, AAVrh.10, AAVhu.14, AAV3a/3b, AAVrh32.33, AAV-HSC15, AAV-HSC17, AAVhu.37, AAVrh.8, CHt-P6, AAV2.5, AAV6.2, AAV2i8, AAV-HSC15/17, AAVM41, AAV9.45, AAV6(Y445F/Y731F), AAV2.5T, AAV-HAE1/2, AAV clone 32/83, AAVShH10, AAV2 (Y->F), AAV8 (Y733F), AAV2.15, AAV2.4, AAVM41, and AAVr3.45. A non-limiting example of derivatives and pseudotypes that have chimeric VP1 proteins is rAAV2/5-1VP1u, which has the genome of AAV2, capsid backbone of AAV5 and VP1u of AAV1. Other non-limiting example of derivatives and pseudotypes that have chimeric VP1 proteins are rAAV2/5-8VP1u, rAAV2/9-1VP1u, and rAAV2/9-8VP1u.

[0401] AAV derivatives/pseudotypes, and methods of producing such derivatives/pseudotypes are known in the art (see, e.g., Mol Ther. 2012 April; 20(4):699-708. doi: 10.1038/mt.2011.287. Epub 2012 Jan. 24. The AAV vector toolkit: poised at the clinical crossroads. Asokan A1, Schaffer D V, Samulski R J.). Methods for producing and using pseudotyped rAAV vectors are known in the art (see, e.g., Duan et al., J. Virol., 75:7662-7671, 2001; Halbert et al., J. Virol., 74:1524-1532, 2000; Zolotukhin et al., Methods, 28:158-167, 2002; and Auricchio et al., Hum. Molec. Genet., 10:3075-3081, 2001).

[0402] Methods of making or packaging rAAV particles are known in the art and reagents are commercially available (see, e.g., Zolotukhin et al. Production and purification of serotype 1, 2, and 5 recombinant adeno-associated viral vectors. Methods 28 (2002) 158-167; and U.S. Patent Publication Numbers US-2007-0015238 and US-2012-0322861, which are incorporated herein by reference; and plasmids and kits available from ATCC and Cell Biolabs, Inc.). For example, a plasmid comprising a gene of interest may be combined with one or more helper plasmids, e.g., that contain a rep gene (e.g., encoding Rep78, Rep68, Rep52 and Rep40) and a cap gene (encoding VP1, VP2, and VP3, including a modified VP2 region as described herein), and transfected into a recombinant cells such that the rAAV particle can be packaged and subsequently purified.

[0403] In some embodiments, the base editors can be divided at a split site and provided as two halves of a whole/complete base editor. The two halves can be delivered to cells (e.g., as expressed proteins or on separate expression vectors) and once in contact inside the cell, the two halves form the complete base editor through the self-splicing action of the inteins on each base editor half. Split intein sequences can be engineered into each of the halves of the encoded base editor to facilitate their transplicing inside the cell and the concomitant restoration of the complete, functioning CBE. Reference is made to International Patent Application No. PCT/US2020/033873, incorporated by reference herein.

[0404] These split intein-based methods overcome several barriers to in vivo delivery. For example, the DNA encoding base editors is larger than the recombinant AAV (rAAV) packaging limit, and so requires different solutions. One such solution is formulating the editor fused to split intein pairs that are packaged into two separate rAAV particles that, when co-delivered to a cell, reconstitute the functional editor protein. Several other special considerations to account for the unique features of base editing are described, including the optimization of second-site nicking targets and properly packaging base editors into virus vectors, including lentiviruses and rAAV.

[0405] Accordingly, the disclosure provides dual rAAV vectors and dual rAAV vector particles that comprise expression constructs that encode two halves of any of the disclosed base editors, wherein the encoded base editor is divided between the two halves at a split site. In some embodiments, the two halves may be delivered to cells (e.g., as expressed proteins or on separate expression vectors) and once in contact inside the cell, the two halves form the complete base editor through the self-splicing action of the inteins on each base editor half. Split intein sequences can be engineered into each of the halves of the encoded base editor to facilitate their transplicing inside the cell and the concomitant restoration of the complete, functioning CBE.

[0406] In various embodiments, the base editors may be engineered as two half proteins (i.e., an CBE N-terminal half and a CBE C-terminal half) by “splitting” the whole base editor as a “split site.” The “split site” refers to the location of insertion of split intein sequences (i.e., the N intein and the C intein) between two adjacent amino acid residues in the base editor. More specifically, the “split site” refers to the location of dividing the whole base editor into two separate halves, wherein in each halve is fused at the split site to either the N intein or the C intein motifs. The split site can be at any suitable location in the base editor base editor, but preferably the split site is located at a position that allows for the formation of two half proteins which are appropriately sized for delivery (e.g., by expression vector) and wherein the inteins, which are fused to each half protein at the split site termini, are available to sufficiently interact with one another when one half protein contacts the other half protein inside the cell.

[0407] Additional methods for the delivery of nucleic acids to cells are known to those skilled in the art. See, for example, US Publication No. 2003/0087817, incorporated herein by reference.

[0408] It should be appreciated that any base editor, e.g., any of the base editors provided herein, may be introduced into the cell in any suitable way, either stably or transiently. In some embodiments, a base editor may be transfected into the cell. In some embodiments, the cell may be transduced or transfected with a nucleic acid construct that encodes a base editor. For example, a cell may be transduced (e.g., with a virus encoding a base editor), or transfected (e.g., with a plasmid encoding a base editor) with a nucleic acid that encodes a base editor, or the translated base editor. Such transduction may be a stable or transient transduction. In some embodiments, cells expressing a base editor or containing a base editor may be transduced or transfected with one or more gRNA molecules, for example when the base editor comprises a Cas9 (e.g., nCas9) domain. In some embodiments, a plasmid expressing a base editor may be introduced into cells through electroporation, transient (e.g., lipofection) and stable genome integration (e.g., piggybac) and viral transduction or other methods known to those of skill in the art.

### Kits and Cells

[0409] In some aspects, this disclosure provides kits comprising a nucleic acid construct comprising nucleotide sequences encoding the CBEs, gRNAs, and/or complexes described herein. Some embodiments of this disclosure provide kits comprising a nucleic acid construct comprising a nucleotide sequence encoding a CBE. In some embodiments, the nucleotide sequence comprises a heterologous promoter that drives expression of the base editor. The nucleotide sequence may further comprise a heterologous promoter that drives expression of the gRNA, or a heterologous promoter that drives expression of the base editor and the gRNA.

[0410] In some embodiments, the kit further comprises an expression construct encoding a guide nucleic acid backbone, e.g., a guide RNA backbone, wherein the construct comprises a cloning site positioned to allow the cloning of a nucleic acid sequence identical or complementary to a target sequence into the guide nucleic acid, e.g., guide RNA backbone.

[0411] The disclosure further provides kits comprising any of the base editors provided herein, a gRNA having complementarity to a target sequence, and one or more of the following: cofactor proteins, buffers, media, and target cells (e.g., human cells).

[0412] Some embodiments of this disclosure provide cells comprising any of the base editors or complexes provided herein. In some embodiments, the cells comprise nucleotide constructs that encodes any of the base editors provided herein. In some embodiments, the cells comprise any of the nucleotides or vectors provided herein. In some embodiments, a host cell is transiently or non-transiently transfected with one or more vectors described herein. In some embodiments, a cell is transfected as it naturally occurs in a subject. In some embodiments, a cell that is transfected is taken from a subject. In some embodiments, the cell is derived from cells taken from a subject, such as a cell line. A wide variety of cell lines for tissue culture are known in the art.

[0413] In other aspects, in the context of the systems and assays provided herein, this disclosure provides kits comprising a nucleic acid construct comprising: (i) a nucleic acid sequence encoding a CBE comprising a Cas9 domain; (ii) a nucleic acid sequence encoding a first gRNA that is engineered to bind to the Cas9 domain of the cytosine base editor, wherein the second guide RNA comprises a sequence that is complementary to a target sequence; (iii) a nucleic acid sequence encoding a first nuclease inactive Cas9 (dCas9) protein; and (iv) a nucleic acid sequence encoding a second gRNA that is engineered to bind to the dCas9 protein, wherein the second guide RNA comprises a sequence that is complementary to an off-target sequence, wherein the off-target sequence has about 60% or less sequence identity to the target sequence. The off-target sequences may otherwise have 6-8 or more mismatches relative to the target sequence. Exemplary kits may further comprise a nucleic acid construct comprising: (v) a nucleic acid sequence encoding a second dCas9 protein; and (vi) a nucleic acid sequence encoding a third gRNA that is engineered to bind to a second dCas9 protein, wherein the third guide RNA is complementary to the third sequence.

[0414] The disclosure further provides kits comprising any of the base editors provided herein, a gRNA having complementarity to a target sequence, an isolated dCas9 protein, a second gRNA having complementarity to an off-target sequence, a second isolated dCas9 protein, and a third gRNA having complementarity to the off-target sequence, and one or more of the following: cofactor proteins, buffers, media, and target cells (e.g., human cells). These kits may further comprise complexes containing additional isolated dCas9 proteins and additional gRNAs engineered to bind thereto and having complementarity to an off-target sequence. Kits may comprise combinations of several or all of the aforementioned components.

[0415] Some embodiments of this disclosure provide cells comprising any of the base editors or complexes provided herein. In some embodiments, the cells comprise nucleotide constructs that encodes any of the base editors provided herein. In some embodiments, the cells comprise any of the nucleotides or vectors provided herein. In some embodiments, a host cell is transiently or non-transiently transfected with one or more vectors described herein. In some embodiments, a cell is transfected as it naturally occurs in a subject. In some embodiments, a cell that is transfected is taken from a subject. In some embodiments, the cell is derived from cells taken from a subject, such as a cell line. A wide variety of cell lines for tissue culture are known in the art.

[0416] In some aspects, the present disclosure provides uses of any one of the base editors described herein and a guide RNA targeting this base editor to a target C:G base pair in a nucleic acid molecule in the manufacture of a kit for nucleic acid editing, wherein the nucleic acid editing comprises contacting the nucleic acid molecule with the base editor and guide RNA under conditions suitable for the substitution of the cytosine (C) of the C:G nucleobase pair with an thymine (T). In some embodiments of these uses, the nucleic acid molecule is a double-stranded DNA molecule. In some embodiments, the step of contacting of induces separation of the double-stranded DNA at a target region. In some embodiments, the step of contacting further comprises nicking one strand of the double-stranded DNA, wherein the one strand comprises an unmutated strand that comprises the G of the target C:G nucleobase pair.

[0417] In some aspects, the present disclosure provides uses of any one of the base editors described herein and a guide RNA targeting this base editor to a target C:G base pair in a nucleic acid molecule in the manufacture of a kit for evaluating the off-target effects of a base editor, wherein the step of evaluating the off-target effects comprises contacting the base editor with the nucleic acid molecule and determining off-target effects in accordance with any one of the disclosed methods. In some embodiments of these uses, the nucleic acid molecule is a double-stranded DNA molecule. In some embodiments, the step of contacting of induces separation of the double-stranded DNA at a target region. In some embodiments, the step of contacting further comprises nicking one strand of the double-stranded DNA, wherein the one strand comprises an unmutated strand that comprises the G of the target C:G nucleobase pair.

[0418] In some embodiments of the described uses, the step of contacting is performed in vitro. In other embodiments, the step of contacting is performed in vivo. In some embodiments, the step of contacting is performed in a subject (e.g., a human subject or a non-human animal subject). In some embodiments, the step of contacting is performed in a cell, such as a human or non-human animal cell.

[0419] The present disclosure also provides uses of any one of the base editors described herein as a medicament. The present disclosure also provides uses of any one of the complexes of base editors and guide RNAs described herein as a medicament.

### EXAMPLES

### Example 1

[0420] Cas9-independent deamination was assayed by CBEs in bacteria using a rifampin resistance assay. Measuring resistance to the antibiotic rifampin has previously been used to characterize the activity and mutagenicity of proteins expressed in E. coli (15-19). Deaminase-catalyzed C:G-to-T:A mutations in the rpoB gene render E. coli resistant to rifampin. It was hypothesized that cells transformed with a plasmid encoding a base editor with Cas9-independent deamination activity would become resistant to rifampin at a frequency that reflects the magnitude of this activity. To simultaneously assess the on-target activity of the base editor, a second plasmid encoding a defective chloramphenicol acetyltransferase with an inactivating T:A-to-C:G point mutation was transformed, together with a guide RNA that directs the CBE to revert this point mutation. Base editors with higher on-target activity more effectively rescue chloramphenicol resistance (9). This design enables survival rates on chloramphenicol to reflect on-target editing efficiency, and survival rates on rifampin to reflect Cas9-independent deamination activity (FIG. 1A).

[0421] To validate this assay, the chloramphenicol and rifampin resistance of bacteria transformed with wild-type APOBEC1, the cytidine deaminase used in BE3, and the catalytically inactive E63A mutant of APOBEC1, were measured. The catalytically inactive E63A mutant of APOBEC1 was measured in three different architectures: as free deaminases, as deaminase-dCas9-UGI fusions, or as deaminase-dCas9 fusions lacking the UGI domain (FIG. 1B). dCas9 was used instead of Cas9 nickase for the prokaryotic cell assays because E. coli lack the nick-directed mismatch repair pathway that enables improved editing by Cas9 nickase CBEs in mammalian cells (20). Compared to the background resistance levels of untethered inactive APOBEC1 E63A construct, untethered active APOBEC1 induced a 1,000-fold increase in rifampin resistance and a 10-fold increase in chloramphenicol resistance. The APOBEC1-dCas9-UGI base editor yielded the same level of rifampin resistance as that of untethered APOBEC1, but a 250-fold higher level of chloramphenicol resistance. These data are consistent with high on-target activity of CBEs, and with Cas9-independent off-target mutagenesis.

[0422] To confirm that rifampin resistance was accompanied by mutations consistent with CBE activity, the rpoB gene of rifampin-resistant colonies was sequenced, and primarily C•G-to-T•A mutations were observed (FIG. 4). The inactive APOBEC1 E63A-dCas9 fusion resulted in rifampin resistance levels equivalent to the background of the assay, suggesting that dCas9 alone does not contribute to these off-target mutations. Compared to the APOBEC1-dCas9-UGI fusion, both the APOBEC1-dCas9 fusion and the APOBEC1 E63A-dCas9-UGI exhibited a substantial decrease in rifampin resistance rates. These results suggest that both the deaminase domain of the base editor as well as the UGI domain can contribute to Cas9-independent off-target mutagenesis.

[0423] To minimize Cas9-independent deamination, the focus was on the deaminase domain for two reasons. First, the rifampin resistance frequency from expression of APOBEC1 alone was 100-fold higher than the average rifampin resistance from expression of UGI alone (FIG. 1B). Second, when the off-target DNA sequencing data from Zuo et al. (13) was analyzed, a strong 5′ T preference among edited cytosines (FIGS. 5A-5B) was found. This preference suggests that APOBEC1, which has a preference for deaminating 5′ TC substrates (21), is primarily responsible for these off-target edits, as opposed to UGI, which is not known to cause a sequence context bias among C:G-to-T:A mutations.

[0424] Many alternative deaminase domains among CBE variants following BE3 have now been reported (1, 22-33). The chloramphenicol and rifampin resistance of E. coli transformed with base editors containing virtually all deaminase domains used for cytosine base editing was measured, starting with naturally occurring APOBEC1, AID, CDA, APOBEC3A, APOBEC3B, and APOBEC3G deaminases (FIG. 1C and FIG. 6). E. coli transformed with CBEs that use CDA, APOBEC3A, and APOBEC3B exhibited rifampin resistance levels that were comparable to, or higher than, the rifampin resistance arising from the original APOBEC1 base editor, consistent with the recent characterization of high editing activity from CDA- and APOBEC3A-derived CBEs (30). In contrast, APOBEC3G and AID base editors produced significantly lower levels of rifampin resistance, suggesting they generate less Cas9-independent deamination in bacteria.

[0425] Next, the panel of deaminases was expanded to include engineered deaminase variants that had been previously developed for base editing applications. The APOBEC1 variants W90Y+R126E (YE1), W90Y+R132E (YE2), R126E+R132E (EE), and W90Y+R126E+R132E (YEE) were created to narrow the on-target base editing window (31) (Y. B. Kim, et al. Nat. Biotechnol. 35, 371-376 (2017), herein incorporated by reference). In addition, as discussed in Grunewald et al., APOBEC1 variants R33A and R33A+K34A could be engineered to have lower off-target RNA editing (32). Additionally, as discussed in Gehrke et al., APOBEC3A (eA3A) has been engineered to have a strict 5′ T sequence context requirement (33). Promisingly, most of these engineered CBEs yielded substantially lower rifampin resistance levels in bacteria. In particular, eA3A, YE1, YE2, EE, YEE, R33A, and R33A+K34AAPOBEC1 variants all resulted in rifampin resistance frequencies equivalent to that of the inactive APOBEC1 E63A-dCas9-UGI control construct (FIG. 1C and FIG. 6). These results indicate that several recently reported base editor variants have much lower Cas9-independent deamination in E. coli, consistent with their original design goals of lower deamination processivity (31), weaker deamination activity (32), or increased requirements for deamination (33).

[0426] Numerous studies have shown that cytidine deaminases exhibit strong sequence context preferences. For instance, while APOBEC1 prefers 5′-TC substrates, A3G prefers 5′-CC substrates, and AID prefers 5′-GC substrates (23, 24, 29, 30). To ensure that the results of the prokaryotic cell rifampin assay were not skewed by the sequence contexts of particular cytosines whose mutagenesis led to rifampin resistance, it was sought to recapitulate the rifampin assay using a different target gene and selection marker. This new target gene would have a different set of cytosines that yield resistance, and therefore a different set of 5′ bases that could introduce bias among the deaminases. To do this, a single copy of the herpes simplex virus thymidine kinase (HSV-TK) gene was inserted into the E. coli chromosome. HSV-TK leads to toxicity in the presence of the nucleoside analog deoxyribofuranosyl)-3,4-dihydro-8H-pyrimido-[4,5-c][1,2]oxazin-7-one (“dP”) (34). It was reasoned that off-target C:G-to-T:A mutations in the HSV-TK gene that inactivate the enzyme would lead to survival on dP. Indeed, while the dynamic range of this assay was narrower than that of the rifampin assay, the same trends held: rAPOBEC1, A3A, A3B, and CDA induced more mutagenesis, whereas most other CBEs induced levels of dP resistance comparable to background. Sequencing of the HSV-TK gene confirmed various resistant alleles caused by C:G-to-T:A mutations among surviving colonies (FIGS. 20A-20B). The consistency between the rifampin and HSV-TK resistance assays suggests that sequence context bias plays a minimal role in the results.

### Example 2

[0427] Next, assays for Cas9-independent deamination by CBEs in human cells that are not dependent on time- and resource-intensive whole-genome sequencing were developed. Since the above results, as well as the findings of Zuo et al. (13, 14), all suggest that the frequency of stochastic Cas9-independent deamination by BE3 is well below the ˜0.1% detection limit of practical high-throughput DNA sequencing experiments, an assay in human cells that magnifies Cas9-independent off-target deamination at specific loci that can be monitored by targeted high-throughput sequencing was sought. All of the deaminases used in CBEs to date are known to deaminate single-stranded DNA or RNA efficiently, but not double-stranded nucleic acids, and recent reports detailing Cas9-independent deamination by BE3 noted that the observed mutations were higher in transcribed regions of the genome (13, 14). Since the low frequency of BE3-induced Cas9-independent deamination is likely the result of the inability of cytidine deaminases to operate on double-stranded DNA, it was reasoned that generating long-lived single-stranded DNA regions at specified positions would enable artificially high Cas9-independent deamination levels sufficient to detect this off-target activity with high sensitivity.

[0428] To evaluate the ability of different base editors to deaminate cytosines in single-stranded DNA regions unrelated to their on-target loci, HEK293T cells were co-transfected with plasmids encoding an SpCas9-based CBE, an SpCas9 on-target guide RNA, a catalytically inactive S. aureus Cas9 (dSaCas9), and an SaCas9 guide RNA targeting a genomic locus unrelated to the on-target site (FIGS. 2A-2B). All editors for mammalian cell experiments were generated using the current “BE4max” architecture, with optimized nuclear localization signals, optimized codon usage, and the optimized structure of NLS-deaminase-Cas9 nickase-UGI-UGI-NLS (5, 35). Deamination of cytosines in the R-loop formed by dSaCas9 should occur in a CBE-dependent, but SpCas9 guide RNA-independent, manner. Indeed, high-throughput sequencing of six dSaCas9 loci three days after plasmid co-transfection resulted in off-target deamination levels by APOBEC1-based BE4 (5, 35) that were easily detected by targeted DNA sequencing (0.4-25%), and were independent of the on-target SpCas9 guide RNA (FIG. 2C). Encouragingly, A3A-BE4 (30), a CBE that uses APOBEC3A, demonstrated substantially higher off-target deamination of dSaCas9-generated R-loops relative to BE4 (FIG. 2B and FIG. 7A), consistent with its higher frequency of generating resistant colonies in the prokaryotic rifampin assay (FIG. 1C), and with the previously reported high degree of mutagenicity of APOBEC3A in human cells (36). These results collectively suggest that the level of in trans deamination within R-loops generated by an orthogonal Cas9 homolog can be used to assess the propensities of SpCas9-derived CBEs to mediate Cas9-independent deamination.

[0429] To identify base editor variants that exhibit reduced Cas9-independent deamination relative to BE4 in human cells, the same panel of 14 deaminase domains (APOBEC1, CDA, AID, APOBEC3A, eA3A, APOBEC3B, APOBEC3G, and FERNY, and APOBEC1 mutants YE1, YE2, YEE, EE, R33A, and R33A+K34A) (1, 22-33) were evaluated in the BE4max architecture for their ability to deaminate dSaCas9-induced R-loops in trans. Base editors with narrowed on-target DNA editing windows such as YE1-BE4, YE2-BE4, and EE-BE4, or with reduced RNA editing propensities such as R33A-BE4, again exhibited substantially reduced Cas9-independent DNA deamination compared to BE4 (FIG. 2D and FIG. 7B). Indeed, YEE-BE4 and R33A+K34A-BE4 displayed nearly undetectable levels of Cas9-independent deamination in this assay. Nearly all of the other CBE variants assayed displayed comparable or higher levels of Cas9-independent deamination relative to BE4 for at least a subset of off-target cytosines within SaCas9-induced R-loops. Compared to BE4, CBEs derived from CDA, AID, and FERNY exhibited higher levels of Cas9-independent deamination at 5′-GC substrates, as expected given their higher activity on 5′-GC sequences than APOBEC1 (25, 26, 32), but not generally at 5′-TC substrates. Likewise, eA3A-BE4 and A3G-BE4 displayed moderate to high levels of Cas9-independent deamination at 5′-TCR and 5′-CC substrates respectively, also consistent with their known sequence context preferences (29,33). All transfected constructs had similar effects on cell viability (FIG. 21), which indicated that cell viability was not a confounding factor in this assay. Importantly, the trends observed in this assay agree with the results of the rifampin resistance and thymidine kinase assays, with the exception of AID-BE4: the results show higher amounts of off-target editing by AID-BE4 in mammalian cells compared to in E. coli. This observation is consistent with previous studies that show higher AID activity in human cells compared to bacteria, potentially due to protein/protein interaction partners or post-translational modifications to the enzyme (17, 37). These data suggest that YE1-BE4, YE2-BE4, EE-BE4, YEE-BE4, and R33A+K34A-BE4 are especially promising CBE variants for applications in which Cas9-independent off-target editing must be minimized.

[0430] It was hypothesized that a primary determinant of Cas9-independent deamination propensity is the catalytic efficiency of the enzyme. Deaminases for base editing should inefficiently catalyze deamination of substrates that are present at low concentrations (such as Cas9-independent off-target sites) but efficiently deaminate on-target substrates when presented at high effective local concentration due to DNA binding of the tethered Cas9 domain. To test this, three different CBE proteins were purified, and their k_{cat}/Kₘ values in vitro were measured for a 5′-Cy3-labeled ssDNA oligonucleotide that contained a single cytosine and was unrelated to the sgRNA present in the reaction. To measure reaction velocities, uracil-containing product formation by gel densitometry following USER enzyme treatment (38) was quantified. YE1-dCas9-UGI and APOBEC3A-dCas9-UGI were observed to have k_{cat}/Kₘ values for ssDNA that are 69-fold lower and 1.3-fold higher, respectively, than that of APOBEC1-dCas9-UGI (FIGS. 8A-8D). These results are consistent with the orthogonal R-loop assays in FIGS. 2A-2D, as well as the rifampin resistance assays in FIGS. 1A-1C, and support a model in which CBEs with higher k_{cat}/Kₘ values for ssDNA have a greater propensity for Cas9-independent deamination in cells.

[0431] As an additional independent assay of Cas9-independent deamination by CBEs in mammalian cells, intracellular deamination frequencies were also measured from BE4, A3A-BE4, YE1-BE4, YEE-BE4, and R33A+K34A-BE4 of a co-transfected 164-mer ssDNA oligonucleotide containing 35 cytosines in HEK293T cells, in light of previous reports that endogenous deaminases can induce mutagenesis in transfected ssDNA oligonucleotides (FIGS. 9A-9C) (39). A3A-BE4 showed 4.4-fold higher Cas9-independent off-target editing compared to BE4, while YE1-BE4, YEE-BE4, and R33A+K34A-BE4 showed 1.7-, 3.2-, and 1.4-fold lower average Cas9-independent off-target editing relative to BE4 at the twelve 5′-TC cytosines present in the oligonucleotide that were deaminated above background (FIGS. 9A-9C), again concordant with findings from the other assays. Taken together, the results from the rifampin and HSV-TK resistance assays in bacteria, orthogonal R-loop assay in human cells, kinetic assay in vitro, and ssDNA deamination assay in human cells are consistent with a model in which CBEs with deaminases that have a low intrinsic catalytic efficiency (k_{cat}/Kₘ) for cytosine-containing ssDNA substrates exhibit lower Cas9-independent off-target deamination.

[0432] The previous studies that detected Cas9-independent off-target DNA editing by CBEs notably did not detect any such off-target editing induced by the canonical adenine base editor, ABE (13, 14). Therefore, it was suspected that ABE would exhibit minimal Cas9-independent off-target editing in the assays described above. Indeed, in the rifampin and HSV-TK resistance assays, ABE induced background levels of resistance, and in the orthogonal R-loop and intracellular ssDNA deamination assays, ABE induced only very low levels of off-target A•T-to-G•C editing (FIGS. 22A-22F). These results highlight the consistency between low off-target activity as assessed by the methods developed herein, and low off-target activity as assessed by previous whole-genome sequencing studies (13, 14).

[0433] Each deaminase domain tested had a distinct on-target editing and off-target editing profile, as shown in FIG. 3A. Of the CBEs that were identified as being especially promising for minimizing Cas9-independent editing, YE1-BE4 and R33A-BE4 offered the best balance between decreased off-target editing and robust on-target activity (FIG. 3B and FIGS. 23A-23B). Meanwhile, YE2-BE4, EE-BE4, R33A+K34A-BE4, and YEE-BE4 produced even lower off-target editing but with a significant decrease in average on-target activity tested across six sites (FIG. 3B and FIGS. 23A-23B).

[0434] To further validate that the above methods for detecting Cas9-independent off-target DNA editing are representative of genome-wide Cas9-independent off-targets, whole-genome sequencing (WGS) of HEK293T cells treated with BE4, YE1-BE4, or a Cas9 D10A nickase control, was performed. Four days following transfection with an sgRNA plasmid and a plasmid encoding either BE4, YE1-BE4, or nCas9(D10A) cotranslationally fused to GFP, the top ˜25% of GFP-positive cells were isolated by flow cytometry, single cells were diluted into individual wells, and grown into clonal populations for 16 days before genomic DNA extraction. This process ensured that any off-target mutations caused by CBE treatment would be present at high allele frequencies within the clonal population of cells derived from a single CBE-treated cell (FIG. 24). WGS was performed at an average depth of 77× on all samples and it was determined that all single-nucleotide variants (SNVs) were present in each sample using the intersection of variants called by three algorithms (FIG. 24, Table 6, Table 7). In order to restrict the analysis to SNVs that were generated following CBE treatment, the SNVs that were present in the original clonal population of cells prior to CBE treatment were filtered out. The WGS results revealed that BE4, but not YE1, produced significantly more C•G-to-T•A SNVs than the nickase-only negative control (FIG. 3C). This confirmed the findings of Yang et al. and Gao et al. that CBEs containing wild type rAPOBEC1 produce off-target C•G-to-T•A SNVs in a Cas9-independent manner. It was also found that BE4-treated samples contained more non-C:G-to-T:A SNVs than YE1 or nickase samples (FIG. 3D and FIGS. 25A-25B), consistent with previous reports that deaminase overexpression in HEK293 cells leads to overall increased SNVs of all types (40). The frequency of BE4-mediated off-target edits that were observed (1.4×10⁻⁶/bp) was also much higher than either of the previously reported values (5×10⁻⁸/bp and 1.7×10⁻⁷/bp reported by Yang and Gao, respectively). This difference likely arises from the different delivery methods used, the sorting of cells to isolate those that express CBEs most highly, and the different cell types used. Importantly, the above WGS results also confirmed the findings of other assays: YE1 exhibits significantly reduced Cas9-independent off-target editing compared to BE4; indeed, YE1 treatment did not lead to statistically significant differences relative to the Cas9 nickase-only control (FIG. 3D and FIGS. 25A-25B).

[0435] As the assessed CBE variants and YE1 have minimal Cas9-independent off-target activity, all exhibit narrowed on-target DNA editing windows (31) (YE1-BE4, YE2-BE4, YEE-BE4, and EE-BE4), or a specific DNA sequence context requirement (32) (R33A+K34A-BE4), an expansion of the targeting scope of these CBEs in order to increase their overall utility was sought. These deaminase variants were tested for their compatibility with SpCas9-NG, one of two recently reported Cas9 variants that recognize a broadened NG PAM (41,42) and found that YE1, and to a lesser extent YE2, YEE, EE, and R33A+K34A, maintained compatibility with SpCas9-NG nickase (FIG. 4A). YE1-NG expands the targeting scope of CBEs while maintaining minimal substantially decreased Cas9-independent off-target activity (FIGS. 10A-10B).

TABLE 4
Target protospacers and amplicons along with corresponding primers used for genomic
DNA amplification.
SpCas9 genomic loci: Top to bottom, left to right the sequences correspond to SEQ ID NOs: 16-45

| Site name | Protospacer | PAM | Amplicon | HTS_fwd | HTS_rev |
|---|---|---|---|---|---|
| HEK2 | GAACACAAAGCATAGACTGC | GGG | TGAATGGATTCCTTGGAAACAATGATAACAAGACCTGGCTGAGCTAAC | ACACTCT | TGGAGTT |
| | | | TGTGACAGCATGTGGTAATTTTCCAGCCCGCTGGCCCTGTAAAGGAAA | TTCCCTA | CAGACGT |
| | | | CTGGAACACAAAGCATAGACTGCGGGGCGGGCCAGCCTGAATAGCTG | CACGACG | GTGCTCT |
| | | | CAAACAAGTGCAGAATATCTGATGATGTCATACGCACAGTTTGACAGAT | CTCTTCC | TCCGATC |
| | | | GGGGCTGG | GATCTNN | TTGAATG |
| | | | | NNCCAGC | GATTCCT |
| | | | | CCCATCT | TGGAAAC |
| | | | | GTCAAAC | AATGA |
| | | | | T | |
| HEK3 | GGCCCAGACTGAGCACGTGA | TGG | ATGTGGGCTGCCTAGAAAGGCATGGATGAGAGAAGCCTGGAGACAGG | ACACTCT | TGGAGTT |
| | | | GATCCCAGGGAAACGCCCATGCAATTAGTCTATTTCTGCTGCAAGTAA | TTCCCTA | CAGACGT |
| | | | GCATGCATTTGTAGGCTTGATGCTTTTTTTCTGCTTCTCCAGCCCTGGC | CACGACG | GTGCTCT |
| | | | CTGGGTCAATCCTTGGGGCCCAGACTGAGCACGTGATGGCAGAGGA | CTCTTCC | TCCGATC |
| | | | AAGGAAGCCCTGCTTCCTCCAGAGGGCGTCGCAGGACAGCTTTTCCT | GATCTNN | TCCCAGC |
| | | | AGACAGGGGCTAGTATGTGCAGCTCCTGCACCGGGATACTGGTTGAC | NNATGTG | CAAACTT |
| | | | AAGTTTGGCTGGG | GGCTGCC | GTCAACC |
| | | | | TAGAAAG | |
| | | | | G | |
| HEK4 | GGCACTGCGGCTGGAGGTGG | GGG | GAACCCAGGTAGCCAGAGACCCGCTGGTCTTCTTTCCCCTCCCCTGC | ACACTCT | TGGAGTT |
| | | | CCTCCCCTCCCTTCAAGATGGCTGACAAAGGCCGGGCTGGGTGGAA | TTCCCTA | CAGACGT |
| | | | GGAAGGGAGGAAGGGCGAGGCAGAGGGTCCAAAGCAGGATGACAG | CACGACG | GTGCTCT |
| | | | GCAGGGGCACCGCGGCGCCCCGGTGGCACTGCGGCTGGAGGTGGG | CTCTTCC | TCCGATC |
| | | | GGTTAAAGCGGAGACTCTGGTGCTGTGTGACTACAGTGGGGGCCCTG | GATCTNN | TTCCTTT |
| | | | CCCTCTCTGAGCCCCCGCCTCCAGGCCTGTGTGTGTGTCTCCGTTCG | NNGAACC | CAACCCG |
| | | | GGTTGAAAGGA | CAGGTAG | AACGGAG |
| | | | | CCAGAGA | |
| | | | | C | |
| RNF2 | GTCATCTTAGTCATTACCTG | AGG | ACGTCTCATATGCCCCTTGGCAGTCATCTTAGTCATTACCTGAGGTGTT | ACACTCT | TGGAGTT |
| | | | CGTTGTAACTCATATAAACTGAGTTCCCATGTTTTGCTTAATGGTTGAGT | TTCCCTA | CAGACGT |
| | | | TCCGTTTGTCTGCACAGCCTGAGACATTGCTGGAAATAAAGAAGAGAG | CACGACG | GTGCTCT |
| | | | AAAAACAATTTTAGTATTTGGAAGGGAAGTGCTATGGTCTGAATGTATG | CTCTTCC | TCCGATC |
| | | | TGTCCCACCAAAATTCCTACGT | GATCTNN | TACGTAG |
| | | | | NNACGTC | GAATTTT |
| | | | | TCATATG | GGTGGG |
| | | | | CCCCTTG | ACA |
| | | | | G | |
| EMX1 | GAGTCCGAGCAGAAGAAGAA | GGG | CAGCTCAGCCTGAGTGTTGAGGCCCCAGTGGCTGCTCTGGGGGCCT | ACACTCT | TGGAGTT |
| | | | CCTGAGTTTCTCATCTGTGCCCCTCCCTCCCTGGCCCAGGTGAAGGT | TTCCCTA | CAGACGT |
| | | | GTGGTTCCAGAACCGGAGGACAAAGTACAAACGGCAGAAGCTGGAG | CACGACG | GTGCTCT |
| | | | GAGGAAGGGCCTGAGTCCGAGCAGAAGAAGAAGGGCTCCCATCACA | CTCTTCC | TCCGATC |
| | | | TCAACCGGTGGCGCATTGCCACGAAGCAGGCCAATGGGGAGGACAT | GATCTNN | TCTCGTG |
| | | | CGATGTCACCTCCAATGACTAGGGTGGGCAACCACAAACCCACGAG | NNCAGCT | GGTTTGT |
| | | | | CAGCCTG | GGTTGC |
| | | | | AGTGTTG | |
| | | | | A | |
| FANCF | GGAATCCCTTCTGCAGCACC | TGG | CATTGCAGAGAGGCGTATCATTTCGCGGATGTTCCAATCAGTACGCAG | ACACTCT | TGGAGTT |
| | | | AGAGTCGCCGTCTCCAAGGTGAAAGCGGAAGTAGGGCCTTCGCGCA | TTCCCTA | CAGACGT |
| | | | CCTCATGGAATCCCTTCTGCAGCACCTGGATCGCTTTTCCGAGCTTCT | CACGACG | GTGCTCT |
| | | | GGCGGTCTCAAGCACTACCTACGTCAGCACCTGGGACCCC | CTCTTCC | TCCGATC |
| | | | | GATCTNN | TGGGGTC |
| | | | | NNCATTG | CCAGGTG |
| | | | | CAGAGAG | CTGAC |
| | | | | GCGTATC | |
| | | | | A | |

SaCas9 genomic loci: Top to bottom, left to right the sequenes correspond to SEQ ID NOs: 46-76

| Site name | Protospacer | PAM | Amplicon | HTS_fwd | HTS_rev |
|---|---|---|---|---|---|
| Sa site 1 | GTGGTAGACAGCATGTGTCCTA | AAGGGT | TGGTGGAGTGCTCTGTGTTTGTCTTTATAA | ACACTCTT | TGGAGTTC |
| | | | ACCCAGATGAGAGGATGAAGGCAACAAGC | TCCCTACA | AGACGTG |
| | | | TTCTGTACCAACATACATGCCCCTTTGCCT | CGACGCT | TGCTCTTC |
| | | | CAAGTCTGGTTATTTTAGGGGGATGCTAGG | CTTCCGAT | CGATTGGT |
| | | | TTGCTTTGGGTCTACCTTACTGAGAAAATG | CTNNNNT | GGAGTGC |
| | | | GCCCCAGGTCATTGTCATGTCCAGTTGTG | GCAGTCT | TCTGTGTT |
| | | | GTAGACAGCATGTGTCCTAAAGGGTATATT | CCTGCTTC | TG |
| | | | CACATGCATGTGCAAAAATACAGGGGTCCT | TCTG | |
| | | | TCTAACCCTATCACAGAGAAGCAGGAGACT | | |
| | | | GC | | |
| Sa site 2 | ATTTACAGCCTGGCCTTTGGGG | TCGGGT | GCTACAGAAAGGTCAGCAGCTATATTTAAC | ACACTCTT | TGGAGTTC |
| | | | CTCAGACCAGGGTGCGGTGGGAGATCTG | TCCCTACA | AGACGTG |
| | | | GTTTCCGGAAGACGGAATGGGGAGAAGG | CGACGCT | TGCTCTTC |
| | | | GCAGGTTCCCCGAGGCGCCCAGACACCC | CTTCCGAT | CGATGCTA |
| | | | AATCCTCCCGGTGACATTTACAGCCTGGC | CTNNNNG | CAGAAAG |
| | | | CTTTGGGGTCGGGTCAACGCTAGGCTGGC | GACATTTC | GTCAGCA |
| | | | AGGGGAAGGGCGGGGCCGTGAGGTGAG | CACCGCA | GC |
| | | | CCGGCGCTGCAGGAAGGGGCCACCACCA | AAATG | |
| | | | GAGGGGCCATTTTGCGGTGGAAATGTCC | | |
| Sa site 3 | GTGTCAGGTAATGTGCTAAACA | GAGAGT | GCTGTGGCATCCAGAGACATGGTTTCTTATCT | ACACTCTT | TGGAGTT |
| | | | CCTTAAGTGTTCAGCTGCTTTTCTTTCATTTATT | TCCCTACA | CAGACGT |
| | | | CCACATATAATTACTATAATTGCTAAACATTTATT | CGACGCT | GTGCTCT |
| | | | TAGTGTCAGGTAATGTGCTAAACAGAGAGTTAC | CTTCCGAT | TCCGATC |
| | | | TGCTCAGACATGTAATAATAATAAATAACACATC | CTNNNNCT | TGCTGTG |
| | | | AAATAACCATACCATTTTAAGCTGTAGTATTATG | GCACCTA | GCATCCA |
| | | | AAGGGAAATCTGGAGCAAAGAGAATAGACTGT | GCCTCCAT | GAGACAT |
| | | | AGGGAAACCAGTTAAGAAATAGGACATGGAGG | GTC | |
| | | | CTAGGTGCAG | | |
| Sa site 4 | GGTGGAGGAGGGTGCATGGGGT | CAGAAT | GGAGGTGGAGAGAGGATGTTTTGCTTATC | ACACTCT | TGGAGTT |
| | | | CAGAAAAGGGAGTGATTGCTTCCAGGGGC | TTCCCTA | CAGACGT |
| | | | CTCAGGGGAATAAATCATAGAATCCTGGAC | CACGACG | GTGCTCT |
| | | | AAGGTTTGAAGGACAGGTAGGATTTGGGT | CTCTTCC | TCCGATC |
| | | | GGGTGGAGGAGGGTGCATGGGGTCAGAA | GATCTNN | TTCCTGA |
| | | | TTGTAACCGAAAACTCATTCCAGGTGGATA | NNGGAG | GGTCTAG |
| | | | GAGAAAATTTCTAGTGTTGTTGTTTTTAAAC | GTGGAGA | GAACCCG |
| | | | TATTTGGGGGACTGGCACAGACCCTTTTTG | GAGGATG | |
| | | | AATACCTGATGGGCTCACATTTCTGTCGAA | T | |
| | | | TCCCAGCGGGTTCCTAGACCTCAGGA | | |
| Sa site 5 | TCTGCTTCTCCAGCCCTGGC | CTGGGT | ATGTGGGCTGCCTAGAAAGGCATGGATGA | ACACTCT | TGGAGTT |
| | | | GAGAAGCCTGGAGACAGGGATCCCAGGG | TTCCCTA | CAGACGT |
| | | | AAACGCCCATGCAATTAGTCTATTTCTGCT | CACGACG | GTGCTCT |
| | | | GCAAGTAAGCATGCATTTGTAGGCTTGATG | CTCTTCC | TCCGATC |
| | | | CTTTTTTTCTGCTTCTCCAGCCCTGGCCTG | GATCTNN | TCCCAGC |
| | | | GGTCAATCCTTGGGGCCCAGACTGAGCAC | NNATGTG | CAAACTT |
| | | | GTGATGGCAGAGGAAAGGAAGCCCTGCTT | GGCTGCC | GTCAACC |
| | | | CCTCCAGAGGGCGTCGCAGGACAGCTTTT | TAGAAAG | |
| | | | CCTAGACAGGGGCTAGTATGTGCAGGTCC | G | |
| | | | TGCACCGGGATACTGGTTGACAAGTTTGG | | |
| | | | CTGGG | | |
| Sa site 6 | GATGTTCCAATCAGTACGCA | GAGAGT | CATTGCAGAGAGGCGTATCATTTCGCGGAT | ACACTCT | TGGAGTT |
| | | | GTTCCAATCAGTACGCAGAGAGTCGCCGT | TTCCCTA | CAGACGT |
| | | | CTCCAAGGTGAAAGCGGAAGTAGGGCCTT | CACGACG | GTGCTCT |
| | | | CGCGCACCTCATGGAATCCCTTCTGCAGC | CTCTTCC | TCCGATC |
| | | | ACCTGGATCGCTTTTCCGAGCTTCTGGCG | GATCTNN | TGGGGTC |
| | | | GTCTCAAGCACTACCTACGTCAGCACCTG | NNCATTG | CCAGGTG |
| | | | GGACCCC | CAGAGAG | CTGAC |
| | | | | GCGTATC | |

SpCas9-NG genomic loci: Top to bottom, left to right the sequenes correspond to SEQ ID NOs: 77-92.

| Name | Protospacer | PAM | Amplicon | HTS_fwd | HTS_rev |
|---|---|---|---|---|---|
| NG site 1 | CAGTCATCTTAGTCATTACC | TGA | ACGTCTCATATGCCCCTTGGCAGTCATCTT | ACACTCT | TGGAGTT |
| | | | AGTCATTACCTGAGGTGTTCGTTGTAACT | TTCCCTA | CAGACGT |
| | | | CATATAAACTGAGTTCCCATGTTTTGCTTA | CACGACG | GTGCTCT |
| | | | ATGGTTGAGTTCCGTTTGTCTGCACAGCC | CTCTTCC | TCCGATC |
| | | | TGAGACATTGCTGGAAATAAAGAAGAGAG | GATCTNN | TACGTAG |
| | | | AAAAACAATTTTAGTATTTGGAAGGGAAGT | NNACGTC | GAATTTT |
| | | | GCTATGGTCTGAATGTATGTGTCCCACCA | TCATATG | GGTGGG |
| | | | AAATTCCTACGT | CCCCTTG | ACA |
| NG site 2 | GCCAGTCCGCGCTCTACTCA | CGC | CCAGAGAGAAAGGAGAGGGAGCGGCGA | ACACTCT | TGGAGTT |
| | | | GCCCTCGCCTCTGCAGCTAGGAGAGGCC | TTCCCTA | CAGACGT |
| | | | AGAGGCAGGCGAGGGAGAGGGTGCGGC | CACGACG | GTGCTCT |
| | | | GATCGCAGGCGAACTCCGCCGCGGGCC | CTCTTCC | TCCGATC |
| | | | GACGCTGGGAGACGACCAGCCCGTAGCC | GATCTNN | TAGTCCA |
| | | | TCCGCCCAACACGGCGGGCGCGCCCGG | NNGACCC | GAGAGAA |
| | | | GAGTCTCCGGCACCCACCCGGTCCCCAT | GATGCGG | AGGAGAG |
| | | | TCCCACCGCACCCGCTACCGGCCAGTCC | TTAGAG | GGAG |
| | | | GCGCTCTACTCACGCTCGGGGCTCTTCC | | |
| | | | AGGCTCCGCGGCTCTAACCGCATCGGGT | | |
| | | | C | | |
| NG site 3 | GATGACCCGTATTATCTGGC | AGT | TTCTAGATGCCGACAAAAGGATCAAGGTG | ACACTCT | TGGAGTT |
| | | | GCGAAGCCCGTGGTGGAGATGGATGGTG | TTCCCTA | CAGACGT |
| | | | ATGAGATGACCCGTATTATCTGGCAGTTCA | CACGACG | GTGCTCT |
| | | | TCAAGGAGAAGGTAGTGCCCCCTCCTGA | CTCTTCC | TCCGATC |
| | | | AGTGGGTGGCTCTCCAGGTGGGCTGGCC | GATCTNN | TAGTGAC |
| | | | AGGGATTGTTCTGTCCCACAGGGTCTTCT | NNTTCTA | AGAGGGA |
| | | | GGACTGCAGGTCCCTAGGACCCCCCCGT | GATGCCG | GAGAAAC |
| | | | TGTCCTGGTAGGGAGGAGCAGCTCTGTTT | ACAAAAG | AGAGC |
| | | | CTCTCCCTCTGTC | GAT | |
| NG site 4 | GGAACAAGGTACTCTTTGAG | TGT | GTAGAAATGGGGTCTTGCTTTGTTGCCCA | ACACTCT | TGGAGTT |
| | | | GGCTGGTCTAAAAAAATATACTACTTTTAT | TTCCCTA | CAGACGT |
| | | | GGATCATACTGCTAAACACTAATATAACCT | CACGACG | GTGCTCT |
| | | | TTGGAAATATAAATCTATATACTTCCTTACC | CTCTTCC | TCCGATC |
| | | | TGGGATTGGAACAAGGTACTCTTTGAGTG | GATCTNN | TAGTGTA |
| | | | TTCACATTGTCACATAAGGGTTCTCCTCCA | NNTTGAG | GAAATGG |
| | | | TGGTAGATACCTGTTCGAACATAGATCTAA | TCTATCG | GGTCTTG |
| | | | AAGAAAAAAGTAGGTATATACTAATGTATAC | AGTGTGT | CTTTG |
| | | | ACTCAACATACACATATGCACACACTCGAT | GCAT | |
| | | | AGACTCAA | | |
| NG site 5 | GCCACAGTCTGGATGGCGGT | TGT | ATCTCTTCAGCCCCTGAGTTGTCACTGGG | ACACTCT | TGGAGTT |
| | | | TGAGCCCGACCGGAAGTCCATCTCCTCC | TTCCCTA | CAGACGT |
| | | | TCCTCCTGCTTCTTGAGGCCGTCAGCCA | CACGACG | GTGCTCT |
| | | | CAGTCTGGATGGCGGTTGTCCACTCCTC | CTCTTCC | TCCGATC |
| | | | CCTGCAGGAGGTCAGGTGAGGCTGCAG | GATCTNN | TAGTATCT |
| | | | GCCTGTACCAGATCAGGAGCTCCACCCC | NNTTCGT | CTTCAGC |
| | | | ACGTCTTTCACCCACCCGCCAGCCTCAC | GACCCTG | CCCTGAG |
| | | | AAGCGTGGTTOCACAGCTGTCGGGGTTC | AGTGTAT | TTGT |
| | | | CCAGAGACAGCCCTGAGGAGGCCACCAC | GTG | |
| | | | TTGACCTGGTCTGGCCACATACACTCAGG | | |
| | | | GTCACGAA | | |

SpCas9 GUIDE-seq off-target sites: Top to bottom, left to right the sequenes correspond to SEQ ID
NOs: 93-203.

| Name | Protospacer | PAM | Amplicon | HTS_fwd | HTS_rev |
|---|---|---|---|---|---|
| HEK3_off1 | CACCCAGACTGAGCACGTGC | TGG | TCCCCTGTTGACCTGGAGAAGCATGAAC | ACACTCTTTCCCTACAC | TGGAGTTCAGACGTG |
| | | | CAGTCAAAAAGTTTAAAGACAAGAGCATT | GACGCTCTTCCGATCTN | TGCTCTTCCGATCTCA |
| | | | AACTGCACCAGTGGGCAGCTCAGCTCA | NNNTCCCCTGTTGACC | CTGTACTTGCCCTGA |
| | | | GACACCAGTAGCGTGGGCACCCAGACT | TGGAGAA | CCA |
| | | | GAGCACGTGCTGGAGCCCAAGAAATGC | | |
| | | | AGAGACCTGTGCACCTCTGGTCAGGGC | | |
| | | | AAGTACAGTG | | |
| HEK3_off2 | GACACAGACTGGGCACGTGA | GGG | TTGGTGTTGACAGGGAGCAACTTCACAG | ACACTCTTTCCCTACAC | TGGAGTTCAGACGTG |
| | | | TCCCAGGCATCAGGACACAGACTGGGC | GACGCTCTTCCGATCTN | TGCTCTTCCGATCTCT |
| | | | ACGTGAGGGAAGCCCAAGGGAGAGGAC | NNNTTGGTGTTGACAG | GAGATGTGGGCAGAA |
| | | | TGGTGTAATCGAGGCTGACTCCACTTTT | GGAGCAA | GGG |
| | | | AATGTTTGACTGATGATAGGTTTCAAGTC | | |
| | | | TCACTAAGTCTCCTTCCCCTTCTGCCCA | | |
| | | | CATCTCAG | | |
| HEK3_off3 | AGCTCAGACTGAGCAAGTGA | GGG | TGAGAGGGAACAGAAGGGCTAAGACTA | ACACTCTTTCCCTACAC | TGGAGTTCAGACGTG |
| | | | AAAGGAACAGAGGAGTTCATAGTGAGCG | GACGCTCTTCCGATCTN | TGCTCTTCCGATCTGT |
| | | | GTAAAGAGCTCAGACTGAGCAAGTGAG | NNNTGAGAGGGAACAG | CCAAAGGCCCAAGAA |
| | | | GGGCTCAGCCTCCCATGGAGGACAGGG | AAGGGCT | CCT |
| | | | GGCTGGGGCCCCTGGCTGATGTCTGGA | | |
| | | | CTGAAGCCCCCACGCCCAGAGGTTCTT | | |
| | | | GGGCCTTTGGAC | | |
| HEK3_off4 | AGACCAGACTGAGCAAGAGA | GGG | CCTAGCACTTTGGAAGGTCGAAGCGGC | ACACTCTTTCCCTACAC | TGGAGTTCAGACGTG |
| | | | AGGATGGCTTCAACCCAGGAGTTCGAG | GACGCTCTTCCGATCTN | TGCTCTTCCGATCTG |
| | | | ACCAGACTGAGCAAGAGAGGGAGAGTG | NNNTCCTAGCACTTTG | CTCATCTTAATCTGCT |
| | | | TCTGTATTAACAACAAACAAACAAACAAA | GAAGGTCG | CAGCC |
| | | | AAACTAAACTAAAAGAAACTGTGGTGTAT | | |
| | | | AATATAAAATTCTGGCTGAGCAGATTAAG | | |
| | | | ATGAGC | | |
| HEK3_off5 | GAGCCAGAATGAGCACGTGA | GGG | AAAGGAGCAGCTCTTCCTGGTGGAAATT | ACACTCTTTCCCTACAC | TGGAGTTCAGACGTG |
| | | | GCGAGCAGAGGCTGCGTGAGTTCCGTA | GACGCTCTTCCGATCTN | TGCTCTTCCGATCTGT |
| | | | ACTCGCACACAGCCTCCATTTGGAGCCA | NNNAAAGGAGCAGCTC | CTGCACCATCTCCCA |
| | | | GAATGAGCACGTGAGGGACCCCGGGCA | TTCCTGG | CAA |
| | | | GAGGGGCCAGTGCTGACATTATGCTCCA | | |
| | | | TGCAACCTCCCATCCTGTTGTGGGAGAT | | |
| | | | GGTGCAGAC | | |
| HEK4_off1 | TGCACTGCGGCCGGAGGAGG | TGG | GGCATGGCTTCTGAGACTCATAGCTGGG | ACACTCTTTCCCTACAC | TGGAGTTCAGACGTG |
| | | | GCTGAAGATCCCTAGGGGGGCTCTGCT | GACGCTCTTCCGATCTN | TGCTCTTCCGATCTGT |
| | | | GGGCTCACTGCTCTCCAGAGTGGTCCA | NNNGGCATGGCTTCTG | CTCCCTTGCACTCCC |
| | | | GCCCGGCTGCAGGGTGCTGCTTCCAGC | AGACTCA | TGTCTTT |
| | | | TTGGTGCACTGCGGCCGGAGGAGGTGG | | |
| | | | AGGATGGAAAGTAAGATTCAAAGACAGG | | |
| | | | GAGTGCAAGGG | | |
| HEK4_off2 | GGCTCTGCGGCTGGAGGGGG | TGG | TTTGGCAATGGAGGCATTGGGCAGGGG | ACACTCTTTCCCTACAC | TGGAGTTCAGACGTG |
| | | | AAGCCTGTCTTCAGGGCACATGCACGTG | GACGCTCTTCCGATCTN | TGCTCTTCCGATCTGA |
| | | | CGCAGGGCTCTGCGGCTGGAGGGGGT | NNNTTTGGCAATGGAG | AGAGGCTGCCCATGA |
| | | | GGGGTTGCTGTTAGTGACAGGGGCCCC | GCATTGG | GAG |
| | | | AGCCAGGCAGGTTTCAGGATTGGGGAG | | |
| | | | CACTTGCTTCGGCTCCCTTGCTCTCATG | | |
| | | | GGCAGCCTCTTC | | |
| HEK4_off3 | GGCACGACGGCTGGAGGTGG | GGG | GGTCTGAGGCTCGAATCCTGGCAGCAG | ACACTCTTTCCCTACAC | TGGAGTTCAGACGTG |
| | | | GTCCTTCATGGCAAGGCGGGAAAAGAG | GACGCTCTTCCGATCTN | TGCTCTTCCGATCTCT |
| | | | AAAAGCCAACGGGTTCTCATGCTGGGAA | NNNGGTCTGAGGCTCG | GTGGCCTCCATATCC |
| | | | AAGATGCCGGGCACGACGGCTGGAGGT | AATCCTG | CTG |
| | | | GGGGGGTTGGGAGTGGGTGGGATGCTT | | |
| | | | GCGTGCCCTGCATGAGGTGCAGGGATAT | | |
| | | | GGAGGCCACAG | | |
| HEK4_off4 | GGCATCACGGCTGGAGGTGG | AGG | TTCCACCAGAACTCAGCCCAGGCTGCT | ACACTCTTTCCCTACAC | TGGAGTTCAGACGTG |
| | | | GTGGGATGGAATCACCTGCACCCGGAT | GACGCTCTTCCGATCTN | TGCTCTTCCGATCTCC |
| | | | GTTCTTTCTGGGCTGGTACATACAGGCA | NNNTTTCCACCAGAACT | TCGGTTCCTCCACAA |
| | | | AGGCATCACGGCTGGAGGTGGAGGGG | CAGCCC | CAC |
| | | | GCCTAACCCGGGGTTGCCCAGGAAGGG | | |
| | | | GTTTGCACATGGATTCGGTGTGTTGTGG | | |
| | | | AGGAACCGAGG | | |
| HEK4_off5 | GGCGCTGCGGCGGGAGGTGG | AGG | CACGGGAAGGACAGGAGAAGGTGCTGG | ACACTCTTTCCCTACAC | TGGAGTTCAGACGTG |
| | | | ACCGCCTGGACTTTGTGCTGACCAGCCT | GACGCTCTTCCGATCTN | TGCTCTTCCGATCTG |
| | | | TGTGGCGCTGCGGCGGGAGGTGGAGG | NNNCACGGGAAGGACA | CAGGGGAGGGATAAA |
| | | | AGCTGAGAAGCAGCCTGCGAGGGCTTG | GGAGAAG | GCAG |
| | | | CGGGGGAGATTGTTGGGGAGGTCCGGT | | |
| | | | GAGTAATGCGGCTTCTTCTCCTGCTTTAT | | |
| | | | CCCTCCCCTGC | | |
| EMX1_off1 | GAGTTAGAGCAGAAGAAGAA | AGG | TGCCCAATCATTGATGCTTTTATACCATCT | ACACTCTTTCCCTACAC | TGGAGTTCAGACGTG |
| | | | TGGGGTTACAGAAAGAATAGGGGCTTAT | GACGCTCTTCCGATCTN | TGCTCTTCCGATCTAG |
| | | | GGCATGGCAAGACAGATTGTCAGAGTTA | NNNTGCCCAATCATTGA | AAACATTTACCATAGA |
| | | | GAGCAGAAGAAGAAAGGCATGGAGTAAA | TGCTTTT | CTATCACCT |
| | | | GGCAATCTTGTGCAGATGTACAGGTAGC | | |
| | | | AGCCCTCAGAAAAAATAGGTGATAGTCTA | | |
| | | | TGGTAAATGTTTCT | | |
| EMX1_off2 | GAGTCTAAGCAGAAGAAGAA | GAG | GTAGCCTCTTTCTCAATGTGCTTCAACCC | ACACTCTTTCCCTACAC | TGGAGTTCAGACGTG |
| | | | ATCACGGCCTTTGCAAATAGAGCCCTTTA | GACGCTCTTCCGATCTN | TGCTCTTCCGATCTG |
| | | | TTCATAGTAGACAAGAGTCTAAGCAGAA | NNNAGTAGCCTCTTTCT | CTTTCACAAGGATGC |
| | | | GAAGAAGAGAGCCACTACCCAACCATCT | CAATGTGC | AGTCT |
| | | | ACTCTTCTAATGGTGTTTTCCTACAAAGG | | |
| | | | CCAAGTCATGAGACTGCATCCTTGTGAA | | |
| | | | AGC | | |
| EMX1_off3 | GAGGCCGAGCAGAAGAAAGA | OGG | GAGCTAGACTCCGAGGGGAGGCTGCGA | ACACTCTTTCCCTACAC | TGGAGTTCAGACGTG |
| | | | GCCGCAAGCGCAGGAGCCGGGTGGGA | GACGCTCTTCCGATCTN | TGCTCTTCCGATCTTC |
| | | | GAGAGACCCCTTCTTCTGCAAATGAGGA | NNNGAGCTAGACTCCG | CTCGTCCTGCTCTCA |
| | | | GGCCGAGCAGAAGAAAGACGGCGACAG | AGGGGA | CTT |
| | | | ATGTTGGGGGGAGGGGACGGTTTGTGA | | |
| | | | GGGATAGGGAGAGAAAGTCTAAGTGAGA | | |
| | | | GCAGGACGAGGA | | |
| EMX1_off4 | GAGTCCTAGCAGGAGAAGAA | GAG | AGAGGCTGAAGAGGAAGACCAGACTCA | ACACTCTTTCCCTACAC | TGGAGTTCAGACGTG |
| | | | GTAAAGCCTGGAGGCTGCCAGGTAGGG | GACGCTCTTCCGATCTN | TGCTCTTCCGATCTG |
| | | | CTGGGGCCAGCATGACCTGAGTCCTAG | NNNAGAGGCTGAAGAG | GCCCAGCTGTGCATT |
| | | | CAGGAGAAGAAGAGGCAGCCTAGAGTC | GAAGACCA | CTAT |
| | | | TTCTGTGAAGTGCACATAGAAGAGAGAC | | |
| | | | TGGGGCCAAGCCACAAAAGATAGAATGC | | |
| | | | ACAGCTGGGCC | | |
| EMX1_off5 | AAGTCTGAGCACAAGAAGAA | TGG | GTAGTTCTGACATTCCTCCTGAGGGAAA | ACACTCTTTCCCTACAC | TGGAGTTCAGACGTG |
| | | | ATAAATAAATTAATTAAAAATATATATATATA | GACGCTCTTCCGATCTN | TGCTCTTCCGATCTTG |
| | | | TGTATAATGATAAACATGCTAACAAAGTCT | NNNGTAGTTCTGACATT | GTCAATATCTGAAAGG |
| | | | GAGCACAAGAAGAATGGTGAGAAGGAAT | CCTCCTGAG | TTTATTTGT |
| | | | ACATTTTATCTAATAAATATGTAAGCCATTA | | |
| | | | ATAAAATGTAAACCATTAAAACAACAAATA | | |
| | | | AACCTTTCAGATATTGACCA | | |
| EMX1_off6 | GAGTCCGGGAAGGAGAAGAA | AGG | CCAAGAGGGCCAAGTCCTGGCTGTCTG | ACACTCTTTCCCTACAC | TGGAGTTCAGACGTG |
| | | | CCTCTGACGACGAGCAAGGTGGAGGCC | GACGCTCTTCCGATCTN | TGCTCTTCCGATCTCA |
| | | | CTTGGTTAGCAGGATGGGTGGTGAGGA | NNNCCAAGAGGGCCAA | GCGAGGAGTGACAG |
| | | | GTCCGGGAAGGAGAAGAAAGGCTCAGC | GTCCTG | CC |
| | | | GCGGCTTGCCTGAGCCTCCCTCCTCCC | | |
| | | | AGCTCCCGGCCCCTGCTGCCGGCGGCT | | |
| | | | GTCACTCCTCGCTG | | |
| EMX1_off7 | GAGCCGGAGCAGAAGAAGGA | GGG | CACTCCACCTGATCTCGGGGCGCTGTG | ACACTCTTTCCCTACAC | TGGAGTTCAGACGTG |
| | | | CGCTGAGGAAGGCGCGGGCGAGCCGG | GACGCTCTTCCGATCTN | TGCTCTTCCGATCTG |
| | | | AGCAGAAGAAGGAGGGAGGGAGCCAG | NNNCACTCCACCTGAT | GAGGAGGGAGGGAG |
| | | | CCGCTGCAGCCACCACCGCCACCATGT | CTCGGGG | CAG |
| | | | CCTACCAAGGCAAGAAGAACATCCCGC | | |
| | | | GGATCACGGTGAGTCCGGGCGCCGCTG | | |
| | | | CTCCCTCCCTCCTCG | | |
| EMX1_off8 | AAGTCCGAGGAGAGGAAGAA | AGG | ACCACAAATGCCCAAGAGACATCACCAC | ACACTCTTTCCCTACAC | TGGAGTTCAGACGTG |
| | | | TTGGAGAGTCAGAGGTCACAAAAGAGG | GACGCTCTTCCGATCTN | TGCTCTTCCGATCTGA |
| | | | GGCCCAACTCCTGTAGAAGTCCGAGGA | NNNACCACAAATGCCC | CACAGTCAAGGGCCG |
| | | | GAGGAAGAAAGGGTTCTGGAGCTCTCA | AAGAGAC | G |
| | | | GGCGTCAGGGCCAGGCCTGCACCCTTC | | |
| | | | TGTGCCCCTCCATGAATGGCTGGCCGG | | |
| | | | CCCTTGACTGTGTC | | |
| EMX1_off9 | GAATCCAAGCAGGAGAAGAA | GGA | CCCACCTTTGAGGAGGCAAAAGGGAATA | ACACTCTTTCCCTACAC | TGGAGTTCAGACGTG |
| | | | AACTTGTGCTTATTTGTTGGAAGAGCAAA | GACGCTCTTCCGATCTN | TGCTCTTCCGATCTTT |
| | | | TATGTTTTTTTGAAACCGAATTATGGATG | NNNCCCACCTTTGAGG | CCATCTGAGAAGAGA |
| | | | GGGATGTGGGGGTGGGAACTAGGCAAG | AGGCAAA | GTGGT |
| | | | GGTCTCAGGGGAATCCAAGCAGGAGAA | | |
| | | | GAAGGAGGGAAAAACCACTCTCTTCTCA | | |
| | | | GATGGAA | | |
| EMX1_off10 | ACGTCTGAGCAGAAGAAGAA | TGG | GTCATACCTTGGCCCTTCCTCTGTACTCT | ACACTCTTTCCCTACAC | TGGAGTTCAGACGTG |
| | | | ATACAGAGTCCAGCTCTGGCCTGGGAAA | GACGCTCTTCCGATCTN | TGCTCTTCCGATCTTC |
| | | | ATACTTTCAGACAAAACGTCTGAGCAGA | NNNGTCATACCTTGGC | CCTAGGCCCACACCA |
| | | | AGAAGAATGGACAGAACTCTGAGGACAT | CCTTCCT | G |
| | | | TCTTGAGGCACTGGCAGAACCTCTGCA | | |
| | | | GGAAGACGAGAGCATTGCTGGTGTGGG | | |
| | | | CCTAGGGA | | |

TABLE 5
ssDNA oligonucleotide sequences for in vitro and intracellular deamination.

| Name | Sequence | HTS_fwd | HTS_rev |
|---|---|---|---|
| multiC_oligo | AGGTAGTAGAGATGAGTATAGAG | ACACTCT | TGGAGTTCA |
| | GAGTGAAAGCGGAAGTAGGGCC | TTCCCTA | GACGTGTGC |
| | TTCGCGCACCTCATGGAATCCCT | CACGACG | TCTTCCGATC |
| | TCTGCAGCTTCGAACGATCGACC | CTCTTCC | TATCCCTCCT |
| | TGGATCGCTTTTCCGAGCTTCTG | GATCTNN | TCATCTCTAT |
| | GCGGTCTCAAGCACTACCTACGT | NNAGGTA | CTATCTC |
| | CGAGATAGATAGAGATGAAGGAG | GTAGAGA | |
| multiA_oligo | CTGTTGTGTCGTTGTCTGTCGTG | ACACTCTT | TGGAGTTCAG |
| | GTGTGAAAGCGGAAGTAGGGCC | TCCCTACA | ACGTGTGCTC |
| | TTCGCGCACCTCATGGAATCCCT | CGACGCT | TTCCGATCTAG |
| | TCTGCAGCTTCGAACGATCGACC | CTTCCGAT | CACACCAACA |
| | TGGATCGCTTTTCCGAGCTTCTG | CTNNNNCT | GCACGAACG |
| | GCGGTCTCAAGCACTACCTACGT | GTTGTGTC | |
| | CGCGTTCGTTCGTGCTGTTGGT | GTTGTCTG | |
| | | TCGTG | |
| 5′Cy3-singleC_oligo | /5Cy3/ATTATTATTATTTCTATTTATT | N/A | N/A |
| | TATTTATTT | | |

Top to bottom, left to right the sequences correspond to SEQ ID NOs: 204-207.

TABLE 6
On-target editing of whole-genome sequencing samples. The four alleles reflect the
tetrapioid nature of chromosome 1 (which contains the on-target RNF2 locus) in the clonal
population of HEK293T cells that were used for this experiment.

| | Allele 1 | Allele 2 | Allele 3 | Allele 4 |
|---|---|---|---|---|
| BE4-1 | GTTATTTTAGTCATTACCTGAGG | GTTATTTTAGTCATTACCTGAGG | GTTATTTTAGTCATTACCTGAGG | GTCATTTTAGTCATTACCTGAGG |
| BE4-2 | GTTATTTTAGTCATTACCTGAGG | GTTATTTTAGTCATTACCTGAGG | GTTATTTTAGTCATTACCTGAGG | GTCATTTTAGTCATTACCTGAGG |
| BE4-3 | GTTATTTTAGTCATTACCTGAGG | GTTATTTTAGTCATTACCTGAGG | GTTATTTTAGTCATTACCTGAGG | GTTATTTTAGTTATTACCTGAGG |
| BE4-4 | GTTATTTTAGTCATTACCTGAGG | GTTCATTTAGTCATTACCTGAGG | GTCATTTTAGTCATTACCTGAGG | GTCATTTTAGTCATTACCTGAGG |
| BE4-5 | GTTATTTTAGTCATTACCTGAGG | GTTATTTTAGTCATTACCTGAGG | GTTATTTTAGTCATTACCTGAGG | GTCATTTTAGTCATTACCTGAGG |
| BE4-6 | GTTATTTTAGTCATTACCTGAGG | GTTATTTTAGTCATTACCTGAGG | GTCATCTTAGTCATTACCTGAGG | GTCATTTTAGTTATTACCTGAGG |
| BE4-7 | GTTATTTTAGTTATTACCTGAGG | GTTATTTTAGTIATTACCTGAGG | GTCATCTTAGTCATTACCTGAGG | GTCATCTTAATTTTAGTCATTAC |
| | | | | CTGAGG |
| BE4-8 | GTTATTTTAGTCATTACCTGAGG | GTTATTTTAGTCATTACCTGAGG | GTCATTTTAGTCATTACCTGAGG | GTCATTTTAGTTATTACCTGAGG |
| YE1-BE4-1 | GTCATTTTAGTCATTACCTGAGG | GTCATTTTAGTCATTACCTGAGG | GTCATCTTAGTCATTACCTGAGG | GTCATCTTAGTCATTACCTGAGG |
| YE1-BE4-2 | GTCATTTTAGTCATTACCTGAGG | GTCATTTTAGTCATTACCTGAGG | GTCATTTTAGTCATTACCTGAGG | GTCATGTTAGTCATTACCTGAGG |
| YE1-BE4-3 | GTCATTTTAGTCATTACCTGAGG | GTCATTTTAGTCATTACCTGAGG | GTCATTTTAGTCATTACCTGAGG | GTCATTTTAGTCATTACCTGAGG |
| YE1-BE4-4 | GTCATTTTAGTCATTACCTGAGG | GTCATTTTAGTCATTACCTGAGG | GTCATTTTAGTCATTACCTGAGG | GTTATTTTAGTCATTACCTGAGG |
| YE1-BE4-5 | GTCATTTTAGTCATTACCTGAGG | GTCATTTTAGTCATTACCTGAGG | GTCATCTTAGTCATTACCTGAGG | GTCATTTTAGTCATTACCTGAGG |
| YE1-BE4-6 | GTCATTTTAGTCATTACCTGAGG | GTCATTTTAGTCATTACCTGAGG | GTCATCTTAGTCATTACCTGAGG | GTCATTTTAGTCATTACCTGAGG |
| YE1-BE4-7 | GTCATTTTAGTCATTACCTGAGG | GTCATTTTAGTCATTACCTGAGG | GTCATITTAGTCATTACCTGAGG | GTCATTTTAGTCATTACCTGAGG |
| YE1-BE4-8 | GTCATTTTAGTCATTACCTGAGG | GTCATTTTAGTCATTACCTGAGG | GTCATCTTAGTCATTACCTGAGG | GTCATTTTAGTCATTACCTGAGG |
| nCas9-l | GTCATCTTAGTCATTACCTGAGG | GTCATCTTAGTCATTACCTGAGG | GTCATCTTAGTCATTACCTGAGG | GTCATCTTAGTCATTACCTGAGG |
| nCas9-2 | GTCATCTTAGTCATTACCTGAGG | GTCATCTTAGTCATTACCTGAGG | GTCATCTTAGTCATTACCTGAGG | GTCATCTTAGTCATTACCTGAGG |
| nCas9-3 | GTCATCTTAGTCATTACCTGAGG | GTCATCTTAGTCATTACCTGAGG | GTCATCTTAGTCATTACCTGAGG | GTCATCTTAGTCATTACCTGAGG |
| nCas9-4 | GTCATCTTAGTCATTACCTGAGG | GTCATCTTAGTCATTACCTGAGG | GTCATCTTAGTCATTACCTGAGG | GTCATCTTAGTCATTACCTGAGG |
| nCas9-5 | GTCATCTTAGTCATTACCTGAGG | GTCATCTTAGTCATTACCTGAGG | GTCATCTTAGTCATTACCTGAGG | GTCATCTTAGTC------TGAGG |
| nCas9-6 | GTCATCTTAGTCATTACCTGAGG | GTCATCTTAGTCATTACCTGAGG | GTCA------------CCTGAGG | GTCATCT------------GAGG |
| nCas9-7 | GTCATCTTAGTCATTACCTGAGG | GTCATCTTAGTCATTACCTGAGG | GTCATCTTAGTCATTACCTGAGG | GTCATCTTAGTCATTACCTGAGG |
| Parent | GTCATCTTAGTCATTACCTGAGG | GTCATCTTAGTCATTACCTGAGG | GTCATCTTAGTCATTACCTGAGG | GTCATCTTAGTCATTACCTGAGG |

TABLE 7
Average coverage for WGS of each sample.

| Sample Name | Avg. Coverage |
|---|---|
| BE4-1 | 58 |
| BE4-2 | 83 |
| BE4-3 | 93 |
| BE4-4 | 68 |
| BE4-5 | 72 |
| BE4-6 | 85 |
| BE4-7 | 68 |
| BE4-8 | 110 |
| YE1-BE4-1 | 84 |
| YE1-BE4-2 | 78 |
| YE1-BE4-3 | 67 |
| YE1-BE4-4 | 76 |
| YE1-BE4-5 | 78 |
| YE1-BE4-6 | 69 |
| YE1-BE4-7 | 69 |
| YE1-BE4-8 | 72 |
| nCas9-1 | 85 |
| nCas9-2 | 81 |
| nCas9-3 | 62 |
| nCas9-4 | 79 |
| nCas9-5 | 86 |
| nCas9-6 | 72 |
| nCas9-7 | 97 |
| Parent | 55 |

TABLE 8
cDNA amplicon sequences and primers used for amplification for HTS.

| Name | Amplicon | HTS_fwd | HTS_rev |
|---|---|---|---|
| RSL1D1 | TTGGCTTTCCAAATCAGTGGGTCTGACTTGAGGTCTGT | ACACTCTTTCCCT | TGGAGTTCAGACG |
| | GATGTGACCCTTTTCCTCACCTGCTCAACCATTATTCAC | ACACGACGCTCT | TGTGCTCTTCCGA |
| | ATGGACTCCATCATATTCATTTGTAGTCATTCCCAGAGT | TCCGATCTNNNN | TCTCTCATAAGCTT |
| | GGCCCAGTGAGGGTCTCGCTGTATGAGAGTCGGCTAC | TGGCTTTCCAAAT | AGACCAACAAGC |
| | GGAATTTAGGAGAAACAGAAGTTTCTTGGCTTTCATGCT | CAGTGGGTC | |
| | GAGCTTGTTGGTCTAAGCTTATGAG | | |
| CTNNB1 | TTTGATGGAGTTGGACATGGCCATGGAACCAGACAGAA | ACACTCTTTCCCT | TGGAGTTCAGACG |
| | AAGCGGCTGTTAGTCACTGGCAGCAACAGTCTTACCTG | ACACGACGCTCT | TGTGCTCTCCAGC |
| | GACTCTGGAATCCATTCTGGTGCCACTACCACAGCTCC | TCCGATCTNNNN | TACTTGTTCTTGAG |
| | TTCTCTGAGTGGTAAAGGCAATCCTGAGGAAGAGGATG | ATTTGATGGAGTT | TGAAGG |
| | TGGATACCTCCCAAGTCCTGTATGAGTGGGAACAGGGA | GGACATGGCC | |
| | TTTTCTCAGTCCTTCACTCAAGAACAAGTAGCTGG | | |
| IP90 | CTGGTTGACCAATCTGTGGTGAATAGTGGAAATCTGCT | ACACTCTTTCCCT | TGGAGTTCAGACG |
| | CAATGACATGACTCCTCCTGTAAATCCTTCACGTGAAAT | ACACGACGCTCT | TGTGCTCTCTGCG |
| | TGAGGACCCAGAAGACCGGAAGCCCGAGGATTGGGAT | TCCGATCTNNNN | TCTGGATCAGGTA |
| | GAAAGACCAAAAATCCCAGATCCAGAAGCTGTCAAGCC | CTGGTTGACCAA | CG |
| | AGATGACTGGGATGAAGATGCCCCTGCTAAGATTCCAG | TCTGTGGTG | |
| | ATGAAGAGGCCACAAAACCCGAAGGCTGGTTAGATGAT | | |
| | GAGCCTGAGTACGTAC | | |

### Example 3

[0436] Next, the SpCas9 nickase domain of YE1-BE4, YE2-BE4, YEE-BE4, EE-BE4, and R33A+K34A-BE4 was replaced with CP1028, a circularly permuted SpCas9 variant (43). It has been recently reported that some circularly permutated Cas9 variants can widen or shift the on-target editing window of CBEs and ABEs (5, 43). Indeed, in HEK293T cells at a variety of endogenous loci, it was observed that YE1-BE4-CP1028, YE2-BE4-CP1028, and EE-BE4-CP1028 exhibited base editing activity windows shifted towards the PAM compared to that of non-permuted YE1-BE4 (FIG. 4B and FIG. 11). Collectively, YE1-BE4 and YE1-BE4-CP1028 enable targeting of nearly all cytosines present in the original base editing activity window of BE4, with the exception of sites that contain long multi-C repeats, which for most applications are not considered attractive targets for cytosine base editing regardless of off-target activity (FIGS. 12A-12D). In addition, YEE-BE4-CP1028 and R33A+K34A-BE4-CP1028 were also active at a subset of sites tested and showed shifted editing windows at those sites (FIG. 4B).

[0437] Variants such as YEE-BE4 and R33A+K34A-BE4 are intriguing in that they offer extremely low, if any, off-target deamination in the orthogonal R-loop assay, but they are only active at a subset of on-target sites. To further increase the target sequence compatibility of R33A+K34A-BE4, which exhibits a relatively stringent 5′-TC requirement for base editing, H122L and D124N, two mutations that were found during the continuous evolution of APOBEC1 to enable efficient deamination of 5′-GC substrates (30), were incorporated. The resulting R33A+K34A+H122L+D124N-BE4 variant (referred to as AALN-BE4) indeed changed the profile of targetable C's relative to the original R33A+K34A variant, enabling editing of some positions that were not accessed by R33A+K34A-BE4 (FIG. 13). Importantly, the AALN variant maintains the minimized levels of Cas9-independent deamination shown by R33A+K34A-BE4, and circularly permuted variants likewise displayed Cas9-independent deamination levels equivalent to or lower than their unpermuted counterparts (FIGS. 14A-14C, and FIGS. 15A-15B). This result indicated that deaminases with the lowest number of off-target edits could be engineered to enhance their targeting scope without disrupting their minimal off-target editing profile.

[0438] Next, it was assessed if the CBEs that exhibit minimal Cas9-independent deamination have altered propensities to generate other unwanted editing outcomes, such as indels and Cas9-dependent off-target DNA base editing. It was observed that all of these variants (YE1-BE4, YE2-BE4, YEE-BE4, EE-BE4, R33A+K34A-BE4, R33A-BE4, AALN-BE4, the CP1028 variants of the first five of these variants, and the Cas9-NG variants of the same five CBEs), induce lower or comparable levels of indels relative to BE4 across all on-target genomic sites tested (FIG. 16). Moreover, all seven CBE variants (YE1-BE4, YE1-BE4-CP1028, YE2-BE4, EE-BE4, YEE-BE4, R33A+K34A-BE4, and AALN-BE4) that were tested showed much lower levels of Cas9-dependent off-target DNA editing than BE4 when tested at 20 genomic sites previously identified by GUIDE-seq (44) to be the most highly edited off-target substrates of SpCas9 nuclease for three target loci (FIG. 17). In addition, YE1-BE3, R33A-BE3, and R33A+K34A-BE3 were recently found to exhibit substantially reduced levels of transcriptome-wide Cas9-independent RNA off-target editing compared to BE3 (32, 45) (see C. Zhou, et al., Nature 571, 275-278 (2019), herein incorporated by reference). It was confirmed that these variants exhibit decreased Cas9-independent off-target editing of three abundant RNA transcripts, and it was found that YEE also shows decreased RNA off-target editing (FIGS. 26A-26C). These results collectively indicate that the CBEs that minimize Cas9-independent off-target editing do not suffer from higher levels of other forms of unwanted editing; indeed, in general they give rise to fewer indels, less Cas9-dependent DNA off-target editing, and less RNA off-target editing.

[0439] Collectively, the expanded targeting capabilities of engineered YE1 variants (YE1-BE4, YE1-CP1028, and YE1-SpCas9-NG) enable targeting, in principle, of 65% of reported pathogenic SNPs that can be corrected by a C:G-to-T:A edit, compared to the only 19% that can be targeted by SpCas9-YE1max alone (FIG. 4C). The known pathogenic SNPs that can be targeted by these engineered CBEs include the vast majority (˜80%) of pathogenic SNPs that can be targeted with the most broadly targetable current-generation BE4max variants, and far outnumber the SNPs targetable by SpCas9-BE4max alone, the most widely-used CBE (FIG. 4C). Therefore, even if a specific target can only be edited to an acceptable level by a BE4-like CBE that uses a deaminase with a high k_{cat}/Kₘ, protein delivery may still provide a path forward to minimize Cas9-independent off target editing.

[0440] Finally, the manner in which base editor expression and exposure contribute to Cas9-independent off-target editing was explored. Western blots of BE4, YE1-BE4, YE1-SpCas9-NG, and A3A-BE4 revealed that the expression levels of YE1-BE4 and YE1-SpCas9-NG were comparable to that of BE4. However, A3A-BE4 had drastically reduced expression compared to the other three editors, in stark contrast with its higher levels of off-target editing (FIG. 27). A variant of BE4 was then transfected with only one, as opposed to two, nuclear localization signals. This construct should have lower levels of CBE trafficked to the nucleus, and therefore lower effective dosing. Indeed, decreased off-target editing in the R-loop assay was seen when only one NLS was included (FIGS. 18A-18D). This collection of experiments conveys that, while expression of a base editor influences Cas9-independent off-target editing, it cannot fully explain the propensity of an editor to perform Cas9-independent deamination (as shown by A3A-BE4's low expression level but high incidence of Cas9-independent editing). These results also suggested that limiting the time of exposure to the base editor through protein delivery might decrease Cas9-independent off-target editing. Therefore, a 1×NLS-BE4 construct was delivered into HEK293T cells as a protein:RNA complex, and levels of orthogonal R-loop deamination were measured. Average Cas9-independent deamination decreased 21-fold relative to plasmid delivery, while retaining similar on-target editing efficiencies (FIGS. 18A-18D). Therefore, even if a specific target can only be edited to an acceptable level by a BE4-like CBE that uses a deaminase with a high k_{cat}/Kₘ, protein delivery may still provide a path forward to minimize Cas9-independent off target editing.

[0441] The assays developed and applied herein enable facile profiling of base editors for Cas9-independent deamination of DNA in bacteria and mammalian cells, and complement in vivo methods such as those performed by Zuo et al. The assays described herein will provide a valuable means of evaluating many CBE variants efficiently and with much lower costs than in vivo experiments that require many whole-genome sequencing experiments (13, 14). The WGS data collected herein validates that these assays are representative of genome-wide off-target DNA mutagenesis rates, and suggests that those CBEs that show low off-target editing in these assays are indeed likely to exhibit low levels of genome-wide off targets. It is anticipated that the assays used here will provide a valuable means of evaluating many CBE variants much more efficiently and with much lower costs than in vivo experiments that require many extensive whole-genome sequencing experiments.

[0442] The many deaminases and CBEs characterized and generated herein collectively form a landscape of base editing options with different on-target and off-target editing characteristics, 15 of which are plotted in FIG. 3A. Given this landscape, and the fact that the 5×10⁻⁸/bp mutation rate attributed to Cas9-independent deamination by BE3 in mouse embryos (13) is lower than the observed rate of spontaneous mutation in many mammalian somatic cell types in vivo (46-51), the optimal choice of base editor depends strongly on a given application's on-target sequence context, on-target PAM availability, target tissue type, and the extent to which minimizing low levels of Cas9-independent deamination is critical.

[0443] For applications in which off-target editing must be strictly minimized, YE1-BE4, YE2-BE4, YEE-BE4, EE-BE4, R33A+K34A-BE4, YE1-CP1028, YE1-SpCas9-NG, and AALN-BE4 variants are recommended, each of which offer ˜10- to 100-fold lower levels of Cas9-independent off-target DNA editing (FIG. 1 and FIGS. 3A-3D 3), ˜5- to 50-fold lower levels of Cas9-dependent off-target DNA editing (FIG. 17), and lower or similar levels of indel formation (FIG. 16), while maintaining ˜50-90% of average on-target DNA editing levels (FIG. 3A, FIG. 3B, and FIG. 4D) relative to BE4max. Additionally, base editor exposure may also be limited to achieve lower off-target editing. Collectively, the diverse targeting capabilities of this suite of CBEs, especially those that utilize the YE1 deaminase domain, enable high-fidelity base editing at the vast majority of previously accessible target sites with efficiencies approaching those of BE4 (FIG. 4C, FIG. 4D).

### Materials and Methods

[0444] Cloning. All plasmids used herein were created using either USER cloning or KLD cloning as described previously (1). DNA was amplified using PhusionU Green Multiplex PCR Master Mix (Thermo Fisher Scientific). Mach1 (Invitrogen) or Turbo (New England BioLabs) chemically competent E. coli were used for plasmid construction.

[0445] Preparation and transformation of chemically competent E. coli. Commercially available chemically competent BL21 E. coli (New England BioLabs) were transformed with a plasmid harboring an inactivated chloramphenicol resistance gene. Transformed cells were plated on LB media+1.5% agar supplemented with maintenance antibiotic (kanamycin, 30 μg/mL). The following day, a single colony was picked and grown overnight in 2×YT media supplemented with maintenance antibiotic. The overnight culture was diluted 100-fold into 50 mL of 2×YT media supplemented with maintenance antibiotic and grown at 37° C. with shaking at 230 rpm to OD₆₀₀ ˜0.4-0.6. Cells were collected by centrifugation at 3,400 g for 10 minutes at 4° C. The cell pellet was resuspended by gentle stirring in 2.5 mL of cold LB media followed by 2.5 mL of 2× TSS (LB media supplemented with 5% v/v DMSO, 10% w/v PEG 3350, and 20 mM MgCl₂). After thorough resuspension, cells were aliquoted, frozen on dry ice, and stored at −80° C. until use.

[0446] To transform cells, 100 mL of competent cells thawed on ice were added to a pre-chilled mixture of plasmid (2 μL) in 98 μL KCM solution (100 mM KCl, 30 mM CaCl₂), and 50 mM MgCl₂ in H₂O). The mixture was incubated on ice for 20 minutes and heat shocked at 42° C. for 75 seconds followed by addition of 500 μL of SOC media (New England BioLabs). Cells were recovered at 37° C. with shaking at 230 rpm for 1 hour, streaked on 2×YT media+1.5% agar plates containing the appropriate antibiotics, and incubated at 37° C. for 14-16 hours.

[0447] Rifampin assay. Chemically competent E. coli harboring a plasmid encoding an inactivated chloramphenicol resistance gene were transformed with a plasmid encoding a base editor+guide RNA. Transformed cells were plated on maintenance antibiotics (30 μg/mL kanamycin, 50 μg/mL spectinomycin, with no chloramphenicol). The following day, colonies were picked and grown overnight in Davis Rich Medium (DRM) and maintenance antibiotics. Overnight cultures were diluted 1:100 into DRM and maintenance antibiotics and grown at 37° C. with shaking at 230 rpm When cells reached OD₆₀₀=0.5, 5 mM rhamnose was added to induce base editor expression. After 18 hours, 700 μL of each culture was centrifuged at 3,400 g for 10 minutes and the cell pellet was resuspended in 150 μL total DRM. Serial dilutions in H₂O of each resuspended culture were plated on three different conditions in parallel: (1) 2×YT agar+30 μg/mL kanamycin+50 μg/mL spectinomycin+20 mM glucose, (2) 2×YT agar+30 μg/mL kanamycin+50 μg/mL spectinomycin+20 mM glucose+100 μg/mL rifampin, or (3) 2×YT agar+30 μg/mL kanamycin+50 μg/mL spectinomycin+20 mM glucose+10 μg/mL chloramphenicol. Surviving colonies were counted following an incubation at 37° C. for 24 hours after plating. To obtain survival rates, the number of colonies in the chloramphenicol or rifampin conditions were divided by the number of colonies counted on the maintenance antibiotic plate.

[0448] Sanger sequencing of rpoB mutations from rifampin-resistant colonies. Rifampin-resistant colonies were picked into 10 μL of H₂O and heated at 95° C. for 10 minutes, followed by PCR using primers AB1678 (5′-AATGTCAAATCCGTGGCGTGAC (SEQ ID NO: 208)) and AB1682 (5′-TTCACCCGGATACATCTCGTCTTC (SEQ ID NO: 209)). Each fragment was sequenced twice using primers AB1680 (″-CGGAAGGCACCGTAAAAGACAT (SEQ ID NO: 210)) and AB1683 (5′-CGTGTAGAGCGTGCGGTGAAA (SEQ ID NO: 211)).

[0449] HSV thymidine kinase assay. Lambda red recombineering was performed as described previously (52) in order to chromosomally integrate a single copy of the HSV thymidine kinase gene under a constitutive promoter and β-lactamase into the tonB locus of BL21 E. coli. The resulting strain was transformed with a plasmid encoding a base editor and guide RNA. Transformed cells were plated on plasmid maintenance antibiotics (50 μg/mL carbenicillin, 50 μg/mL spectinomycin). The following day, colonies were picked and grown overnight in DRM and maintenance antibiotics. Overnight cultures were diluted 1:100 into DRM and maintenance antibiotics and grown at 37° C. with shaking at 230 rpm. When cells reached OD₆₀₀=0.5, 5 mM rhamnose was added to induce base editor expression. After 18 hours, 700 μL of each culture was centrifuged at 3,400 g for 10 minutes and the cell pellet was resuspended in 150 μL total DRM. Serial dilutions in H₂O of each resuspended culture were plated on two different conditions in parallel: (1) 2×YT agar+50 μg/mL carbenicillin+50 μg/mL spectinomycin+20 mM glucose or (2) 2×YT agar+50 μg/mL carbenicillin+50 μg/mL spectinomycin+20 mM glucose+10 μM 6-(β-D-2-Deoxyribofuranosyl)-3,4-dihydro-8H-pyrimido-[4,5-c][1,2]oxazin-7-one (dP). Surviving colonies were incubated at 37° C. for 24 hours after plating, then counted. To obtain survival rates, the number of colonies in the dP condition was divided by the number of colonies counted on the maintenance antibiotic plate.

[0450] Sanger sequencing of HSV thymidine kinase mutations from dP-resistant colonies. dP-resistant colonies were picked into 10 μL of H₂O and heated at 95° C. for 10 minutes, followed by PCR using primers AR393 (5′-AGGCAGTGGGATTGTGGTG) (SEQ ID NO: 230) and AR394 (5′-CGGTCAGCATTAATATTGAAGTGTGG) (SEQ ID NO: 231). Each fragment was sequenced three times using primers AB301 (5′-ATAAAGTTGCAGGACCACTTCT) (SEQ ID NO: 232), AR341 (5′-GCAAGCAGCCCGTAAAC) (SEQ ID NO: 233), and AR392 (5′-CGTACGTCGGTTGCTATG) (SEQ ID NO: 234).

[0451] Analysis of BE3-induced point mutations in mouse embryos reported by Zuo et al. (13). Using the genomic locations of all C•G-to-T•A SNVs reported by Zuo et al. (see Tables S6 and S7 of Zuo et al.) the flanking sequences (20 base pairs on either side) were extracted from the mouse mm10 reference genome [GCA_000001635.2]. These flanking sequences were aligned, fixing the mutant cytosine in each case at position 21, and the resulting alignment was used to produce a sequence logo using WebLogo 3.6.0 (53). The custom Python script used for this analysis is included in Supplementary Note 1 below Example 3.

[0452] Cell culture. HEK293T cells were maintained in DMEM+GlutaMAX (Life Technologies) supplemented with 10% (v/v) fetal bovine serum. Cells were cultured at 37° C. with 5% carbon dioxide and were confirmed to be negative for mycoplasma by testing with MycoAlert (Lonza Biologics).

[0453] Mammalian cell transfections. HEK293T cells were seeded in a 48-well, poly-D-lysine-coated plate (Corning) and transfected at 70% confluence. Plasmids were prepared for transfection using either a ZymoPURE II midi prep kit (Zymo Research Corporation) or a Qiagen midi prep kit (Qiagen). For on-target editing experiments, 750 ng of base editor plasmid and 250 ng of guide RNA plasmid were co-transfected into HEK293T cells using 1.5 μL of Lipofectamine 2000 (ThermoFisher Scientific) per well as directed by the manufacturer. 20 ng of pmaxGFP transfection control plasmid (Lonza Biologics) was used as a transfection control. For orthogonal R-loop assays to measure off-target editing, 200 ng of SpCas9 guide RNA plasmid, 200 ng of SaCas9 guide RNA plasmid, 300 ng of base editor plasmid, and 300 ng of dSaCas9 plasmid were co-transfected into HEK293T cells using 1.5 μL of Lipofectamine 2000. For controls involving no base editor or no sgRNA, pUC19 DNA was used to maintain the total quantity of transfected DNA at 1000 ng. For the intracellular oligonucleotide deamination experiment, 750 ng of base editor plasmid, 250 ng of guide RNA plasmid, and 1 pmol of ssDNA oligonucleotide (Integrated DNA Technologies) were co-transfected into HEK293T cells using 1.5 μL of Lipofectamine 2000.

[0454] High-throughput sequencing of genomic DNA. Genomic DNA was sequenced using methods previously described (1). Briefly, genomic DNA was isolated from HEK293T cells three days after transfection. Cells were washed with PBS and then lysed with 150 μL of lysis buffer consisting of 10 mM Tris-HCl (pH 7), 0.05% SDS, and 25 μg/mL of Proteinase K (ThermoFisher Scientific) at 37° C. for 1 hour and then heat inactivated at 80° C. for 30 minutes. Following lysis, 1 L of the genomic DNA lysate was used as input for the first of two PCR reactions. Genomic loci were amplified using a PhusionU PCR kit (Life Technologies) PCR1 primers (“HTS_fwd” and “HTS_rev”) for genomic loci are listed in Table 4. 30 cycles of PCR were performed for all loci with an annealing temperature of 61° C. and an extension time of 30 seconds. For sequencing of the co-transfected ssDNA oligonucleotide, 22 cycles of PCR1 were performed. PCR1 products were confirmed on a 2% agarose gel. 1 μL of PCR1 was used as an input for PCR2 to install Illumina barcodes. PCR2 was conducted using a Phusion HS II kit (Life Technologies). Following PCR2, samples were pooled and gel extracted in a 2% agarose gel using a Qiaquick Gel Extraction Kit (Qiagen). Library concentration was quantified using the Qubit High-Sensitivity Assay Kit (ThermoFisher Scientific). Samples were sequenced on an Illumina MiSeq instrument (paired-end read, R1: 200-280 cycles, R2: 0 cycles) using an Illumina 300 v2 Kit (Illumina).

[0455] High-throughput sequencing data analysis. Sequencing reads were demultiplexed using the MiSeq Reporter (Illumina) and fastq files were analyzed using Crispresso2 (see K. Clement et al., CRISPResso2: Accurate and Rapid Analysis of Genome Editing Data from Nucleases and Base Editors. Nature Biotechnology 37, 224-226 (2019), incorporated by reference herein) (54). Representative analysis input and usage are described in Supplementary Note 2 below Example 3. Prism 8 (GraphPad) was used to generate dot plots and bar plots of these data. Base-editing values are representative of n=3 independent biological replicates performed at different times, generally by different researchers, with the mean±SEM shown.

[0456] Protein expression and purification for in vitro assays. Base editor purification was performed as described previously (12), with a few modifications. BL21DE3* (ThermoFisher Scientific) chemically competent E. coli were transformed with a plasmid encoding N-terminally 6×His-tagged base editor under control of an IPTG-induced T7 promoter. Individual colonies were picked and grown in 1 L of 2×YT media until OD₆₀₀ ˜0.7-0.8. Cells were cold shocked on ice for 1-2 hours, then induced with 1 mM IPTG (isopropyl-β-D-thiogalactoside; Gold Biotechnology) and grown for a further 12-16 hours at 16° C. with shaking at 220 rpm Cells were collected by centrifugation at 6,000 g for 20 minutes and the resulting cell pellet was resuspended in 25 mL high-salt buffer (100 mM Tris-Cl pH 8.0, 1 M NaCl, 5 mM tris(2-carboxyethyl)phosphine (TCEP; Sigma-Aldrich), 20% glycerol) supplemented with 0.4 mM phenylmethane sulfonyl fluoride (PMSF; Sigma-Aldrich) and EDTA-free protease inhibitor pellet (Roche, 1 pellet per 50 mL lysis buffer used). Cells were lysed by sonication (6 minutes total, 3 seconds on, 3 seconds off) and the lysate was cleared by centrifugation at 22,000 g for 20 minutes. The cleared lysate was incubated with 1.5 mL of TALON Cobalt resin (Clontech) with rotation at 4° C. for 1-2 hours. The resin was washed two times with 15 mL cold high-salt buffer and bound protein was eluted in medium-salt buffer (100 mM Tris-HCl pH 8.0, 0.5 M NaCl, 20% glycerol, 5 mM TCEP) supplemented with 200 mM imidazole. The isolated protein was then buffer-exchanged with low-salt buffer and concentrated using an Amicon Ultra-15 centrifugal filter unit (100,000 molecular weight cutoff). The isolated protein was further purified on a 5 mL Hi-Trap HP SP (GE Healthcare) cation exchange column using an Akta Pure FPLC. Protein-containing fractions were pooled and concentrated using an Amicon Ultra-15 centrifugal filter unit (100,000 molecular weight cutoff). Proteins were quantified using Quick Start Bradford reagent (Bio-Rad) using BSA standards (Bio-Rad) and stored short-term at 4° C.

[0457] Protein purity was characterized by SDS-PAGE analysis. Briefly, proteins were denatured at 95° C. for 10 minutes in Laemmli sample loading buffer (Bio-Rad) supplemented with 2 mM dithiothreitol (DTT; Sigma-Aldrich) and separated by electrophoresis at 200 V for 40 minutes on a Bolt 4-12% Bis-Tris Plus (ThermoFisher Scientific) pre-cast gel in Bolt MES SDS running buffer (ThermoFisher Scientific). Gels were stained with InstantBlue reagent (Expedeon) for 1 hour and washed several times with H₂O before imaging with a G: Box Chemi XRQ (Syngene).

[0458] In vitro deamination assays. A 5′-Cy3-labeled ssDNA oligonucleotide. (5′-Cy3-ATTATTATTATTTCTATTTATTTATTTATTT (SEQ ID NO: 212)) was purchased as an HPLC-purified oligonucleotide from Integrated DNA Technologies (IDT). All reactions were performed in reaction buffer (20 mM HEPES pH 7.5, 150 mM KCl, 0.5 mM dithiothreitol (DTT), 0.1 mM EDTA, 10 mM MgCl₂) (12) with concentrations of 5′-Cy3-labeled oligonucleotide varying from 0.2-100 μM and concentrations of each purified base editor protein that were >20-fold lower than the substrate concentration assayed in each case. Base editor proteins were incubated at room temperature for 5 minutes with a non-targeting sgRNA added in a 1:1 molar ratio. Subsequently, the 5′-Cy3-labeled oligonucleotide was added to the appropriate concentration and the reactions were incubated at 37° C. for 30 minutes. Reactions were stopped by the addition of buffer PB (100 μL, Qiagen) and isopropanol (25 μL) and purified on a MinElute spin column (Qiagen), eluting in 15 μL of CutSmart buffer (New England BioLabs). USER enzyme (1.5 U, New England BioLabs) was added to the purified ssDNA and incubated at 37° C. for 1 hour. 10 μL of the resulting solution was combined with 10 μL of loading buffer (0.09 M tris(hydroxymethyl)aminomethane, 0.09 M sodium tetraborate, 10 mM EDTA pH 8.0, 10 M urea, 20% sucrose, 0.1% SDS) and loaded on a 10% TBE-urea gel (Bio-Rad) that was pre-run in 0.5× TBE buffer for 15 minutes at 180 V. The cleaved uracil-containing products were resolved from the uncleaved cytosine-containing starting material by electrophoresis for 30 minutes at 180 V, and the gel was imaged on a GE Typhoon FLA 7000 imager. The ratio of product to substrate bands was quantified by densitometry using ImageJ and used to calculate initial reaction velocities. Nonlinear regression was performed using Prism 8 (GraphPad) to fit these data to the Michaelis-Menten equation in order to determine k_{cat} and Kₘ values. Calculation of the propagated error in the k_{cat}/Kₘ ratio from the individual errors in the k_{cat} and Kₘ parameters estimated by the regression is described in Supplementary Note 3 below Example 3.

[0459] Transfection and fluorescence-activated cell sorting for WGS samples. HEK293T cells were transfected with 750 ng of CBE-P2A-GFP constructs and 250 ng of RNF2-targeting guide RNA as described above. Four wells were transfected for each tested CBE or control (Cas9 nickase instead of a CBE). Four days after transfection, cells were trypsinized with 50 μL of trypsin per well, and resuspended in 200 uL of DMEM (50% FBS (v/v), 100U/mL penicillin/streptomycin). Wells of the same editor were pooled, and cells were filtered through a cell strainer cap (VWR International). Flow sorting was performed on a FACS Aria II (BD Biosciences) sorter using BDFACS Diva software. Cells were gated on forward/side scatter and then gated for GFP signal compared to an untransfected negative control. Cells were then gated on fluorescence intensity. Intensity gates were set to contain the top 28% of GFP-positive YE1-P2A-GFP cell, which corresponded to the top 30% of GFP-positive BE4-P2A-GFP cells and the top 45% of GFP-positive Cas9 nickase-P2A-GFP positives cells (see FIGS. 28-31). Approximately 70,000 cells were collected for each sample in bulk. Of these, about 20,000 cells were sequenced for bulk on-target editing efficiency at the RNF2 locus. The remaining cells were diluted to a concentration of 6 cells/mL (equivalent to 0.9 cells/well) in DMEM (10% FBS (v/v), 100U/mL penicillin-streptomycin). 150 uL of this diluted mixture was pipetted into each well of a 96-well plate. Wells were monitored daily to ensure that each population of cells came from only a single cell. Cells were split into a 48-well, poly-D-lysine-coated plate (Corning) and grown for 16 days before harvesting.

[0460] Whole-genome sequencing sample preparation. Cells were lysed using a DNA Agencourt Advance (Beckman Coulter) according to manufacturer instruction. Briefly, 100 μL of lysis buffer (95 μL of Beckman lysis buffer, 2.5 μL of proteinase K (Thermo Fisher), and 2.5 μL of 1M DTT) were added to each well and incubated for 5 min at 37° C. Lysate was then transferred to PCR strips and incubated at 55° C. for 1 hour. 50 μL of Beckman Binding Buffer 1 (Beckman Coulter) was added, and samples were incubated for 2 minutes before the addition of magnetic beads contained in Beckman Binding Buffer 2 (Beckman Coulter). Samples were incubated for 5 minutes and then placed on a magnetic plate for 10 minutes. Supernatant was removed, and beads were washed twice with 70% ethanol. DNA was then resuspended in 50 μL of elution buffer. Samples were placed on a magnetic plate, and the supernatant containing the purified DNA was removed and transferred to fresh tubes. DNA yields were quantified with a Nanodrop. Libraries were created using a Kapa HyperPrep Plus kit according to manufacturer instruction. 800 ng of purified DNA per sample was diluted to a total volume of 35 μL in 10 mM Tris-HCl (pH 8). 5 μL of KAPA frag buffer and 10 μL of Kapa frag enzyme were added to each reaction. Samples were placed in a pre-cooled PCR block and then heated to 37° C. for 12 minutes. Immediately after 12 minutes, samples were placed on ice, and 7 μL of End Repair and A-tailing buffer and 3 μL of End Repair and A-tailing enzyme mix were added immediately to each sample. Samples were mixed and then heated at 20° C. for 30 minutes and then 65° C. for 30 minutes in a thermocycler with the lid temperature set to 85° C. Following this incubation, 10 μL of DNA ligase, 30 μL of DNA ligation buffer, and 10 μL of 15 μM KAPA Adapter primers were added. This mixture was then incubated at 20° C. for 15 minutes. A post-ligation cleanup was performed by adding 88 μL of Kapa Pure beads to the adapter mix. After a 10-minute incubation, beads were collected on a magnetic plate, and the supernatant was discarded. Samples were washed twice with 200 μL of 80% ethanol. Beads were dried for 4 minutes, and 55 μL of elution buffer was added. After incubation, 50 μL of purified DNA was removed from beads.

[0461] WGS library size selection and quality control. A size selection was performed on the purified library. A 0.5× cut was performed to remove fragments greater than 1 kb: 25 μL of Kapa Pure beads were added to the eluted library, incubated, and placed on a magnet. The supernatant was collected and saved. 10 μL of fresh Kapa Pure beads were then added to the supernatant to perform a 0.7× second cut. After incubation, libraries were placed on a magnet and the supernatant was removed and discarded. Beads were washed twice with 200 μL of 80% ethanol and then dried for 4 minutes. 40 μL of 10 mM Tris-HCl (pH 8) was added to the beads to elute the final library. Each individual genome was quantified using the Kapa Quantification kit as described previously (1). Library length was determined using an Agilent High Sensitivity DNA Kit and an Agilent 2100 Electrophoresis Bioanalyzer according to manufacturer instructions. Mean fragment length for final libraries was approximately 700 bp.

[0462] Whole-genome sequencing and data analysis. Sequencing was performed at the Broad Institute Genomics Platform on an Illumina NovaSeq 6000 using two S4 flow cells. Initial data processing and read alignment was performed by the Broad Institute Genomics Platform. Reads were demultiplexed and aligned to the hg19 (b37) reference genome using BWA-MEM (v0.7.7) (55). Aligned bams were sorted and optical duplicates were marked using Picard tools (v1.1428). Base quality recalibration was performed using GATK (v3.4). All subsequent analyses were performed using the FAS RC Cannon high-performance computing cluster (Harvard University). Sequencing coverage was calculated using mosdepth (v0.2.6) (56). Variant calling on every sample was conducted independently using three algorithms, GATK HaplotypeCaller (v4.1.3.0) (57), freebayes (v1.3.1) (58), and VarScan (v2.4.3) (59), assuming a ploidy of four and a minimum alternate allele read frequency of 0.1 to call an SNV. Bcftools (v1.9) were used to find the intersection of the variants called by all three algorithms in order to generate high-confidence variant calls. For all treated samples, bcftools were used to filter out variants in the treated sample that were present in the parent in order to retain only de novo variants that arose post treatment with base editors. Bcftools were also used to filter out variants present at allele frequencies greater than 0.5 as previously reported (40) in order to restrict analysis to variants that likely arose as a result of base editor treatment. Finally, bcftools were used to exclude variants that exhibited at least one of the following poor quality metrics based on the GATK vcf annotations: QD<2, FS>60, SOR>3, MQ<40, MQRankSum<−5. These final, high-quality variant calls for each treated sample were used for all downstream analyses.

[0463] RNA off-target editing analysis. HEK293T cells were transfected with 750 ng of plasmid encoding editors and 250 ng of guide RNA plasmid as described above. Cells were lysed 48 hours after transfection using the RNeasy kit (Qiagen) following manufacturer instructions. Briefly, media was aspirated, and cells were washed with ice cold PBS. To lyse, 350 μL of RLT buffer was added to each well. Cells were pipetted vigorously and then transferred to a DNA eliminator column. Columns were spun at 8000×g for 30 seconds, and 350 μL of 70% ethanol was added to the flow through, which was then applied to an RNeasy spin column. The mixture was centrifuged for 8000×g for 30 seconds. The column was then washed with 700 μL of RW1 buffer and then twice with 500 μL of RPE buffer. The membrane was dried by centrifuging at 8000×g for 1 minute. Purified RNA was eluted with 40 μL of RNase-free water, and 2 μL of RNase-OUT (Fisher Scientific) was added. cDNA was generated using SuperScript IV (Thermo Fisher Scientific). 2 μL of purified RNA was combined with 1 μL of dNTPs, 1 μL of a poly T primer, and 9 μL of RNase-free water. The mixture was heated to 65° C. for 5 minutes and then placed on ice for 1 minute. 4 μL of 5× superscript buffer, 1 μL of SSIV reverse transcriptase 1 μL of 0.1M DTT, and 1 μL of RNase OUT were then added. Two additional reactions were also performed, and reverse transcriptase was not added, as a control for gDNA contamination. Reverse transcription reactions were heated to 50° C. for 10 minutes, then to 80° C. for 10 minutes and then placed on ice. 1 μL of RNAse H was added, and the samples were heated to 37° C. for 20 minutes to degrade RNA. 1 uL of this reaction was used as a template for the first PCR of amplicon sequencing: the remaining protocol is identical to that used for gDNA sequencing. Primers used for each cDNA amplicon and amplicon sequences are listed in Table 8. The no-RT controls were also subjected to Miseq prep, and it was ensured that there were negligible read counts for these samples.

[0464] Western blot analysis. HEK293T cells were transfected with 750 ng of plasmid encoding C-terminal 3×HA-tagged base editors and 250 ng of guide RNA plasmid as described above. Cells were lysed 48 hours post transfection at 4° C. for 30 minutes in RIPA buffer (Thermo Fisher) supplemented with 1 mM phenylmethane sulfonyl fluoride (PMSF; Sigma-Aldrich) and EDTA-free protease inhibitor pellet (Roche, 1 pellet per 50 mL lysis buffer used). Lysates were cleared by centrifugation at 12,000 rpm for 20 minutes. Total protein concentration was quantified using Quick Start Bradford reagent (Bio-Rad) using BSA standards (Bio-Rad). Protein extracts were denatured at 95° C. for 10 minutes in Laemmli sample loading buffer (Bio-Rad) supplemented with 2 mM dithiothreitol (DTT; Sigma-Aldrich) and were separated by electrophoresis at 180 V for 40 minutes on a Bolt 4-12% Bis-Tris Plus (ThermoFisher Scientific) pre-cast gel in Bolt MES SDS running buffer (ThermoFisher Scientific). 10 μg of total protein was loaded per well. Transfer to a PVDF membrane was performed using an iBlot 2 Gel Transfer Device (ThermoFisher Scientific) according to the manufacturer's protocols. The membrane was cut in half at the 75 kDa marker and each half was blocked separately in Odyssey Blocking Buffer (LI-COR) in TBS for 1 hour at room temperature with rocking. The high molecular weight half was incubated with rabbit anti-HA (Cell Signaling Technologies 3724S; 1:1000 dilution) in SuperBlock Blocking Buffer (ThermoFisher Scientific) at 4° C. overnight with rocking. The low molecular weight half was incubated with rabbit anti-GAPDH (Cell Signaling Technologies 5174S; 1:1000 dilution) in SuperBlock Blocking Buffer (ThermoFisher Scientific) at 4° C. overnight with rocking. The membranes were washed 2× with TBST (TBS+0.5% Tween-20) for 10 minutes each at room temperature, then incubated with goat anti-rabbit 680RD (LI-COR 926-68071) diluted 1:10,000 in SuperBlock for 1 hour at room temperature. The membrane was washed as before and imaged using an Odyssey Imaging System (LI-COR).

[0465] Cell viability assay. HEK293T cells were seeded in a 96-well, clear-bottomed black plate (Corning) and transfected at 70% confluence with 200 ng of base editor plasmid, 40 ng of guide RNA plasmid, and 0.5 μL of Lipofectamine 2000 (ThermoFisher Scientific) per well. 48 or 72 hours post transfection, cell viability was measured using the CellTiter-Glo Reagent (Promega) according to the manufacturer's protocol. Luminescence was measured using an Infinite M1000 Pro microplate reader (Tecan).

[0466] Protein nucleofections. To compare on-target editing and off-target editing at orthogonal R-loops using DNA or ribonucleoprotein (RNP) delivery of base editors, cells were first lipofected as described above with the respective plasmids, supplemented to 1000 ng total with pUC19 plasmid if base editor plasmid was not included. 24 hours after lipofection, to allow time for expression of SaCas9 and formation of the R-loop, cells that were treated only with dSaCas9 and orthogonal guide RNA plasmids were trypsinized in 50 μL of TrypLE express (Life Technologies) per well for 5 minutes at 37° C. Cells were suspended and trypsin was quenched with an equal volume of fresh media. Cells were counted in a Countess II cell counter (ThermoFisher Scientific) and 200,000 cells per protein nucleofection sample were apportioned into a single tube. These cells were centrifuged for 8 minutes at 100 g, the supernatant was discarded, and cells were resuspended in 10 L per 200,000 cells of nucleofection solution supplemented as described by the manufacturer (Lonza, SF Cell Line 4D-Nucleofector X Kit S). RNP solutions were prepared by adding 100 pmol of chemically-modified sgRNA (Synthego) to 10 μL of supplemented nucleofection solution per sample. 94 pmol of BE4 protein (expressed and purified by Aldevron, and provided as a generous gift from Prof. Mark Osborn) was added to a final volume of 12 μL, and RNP complexes were formed by incubation at room temperature for 5 minutes. 12 μL of RNP solution was mixed with 200,000 cells in 10 μL of nucleofection solution per sample, and added to a Nucleocuvette (Lonza, SF Cell Line 4D-Nucleofector X Kit S). Cells were nucleofected in a Lonza 4D Nucleofector using program CM-130 according to the manufacturer's instructions. Immediately following nucleofection, cells were recovered for 5 minutes by adding 80 μL of pre-warmed media. 30 μL of recovered cells from each sample were diluted to a final volume of 250 μL in fresh media and incubated at 37° C. for 2 more days before extraction of genomic DNA from all samples, including those treated only with DNA. Three different splits of cells were used in triplicate samples for each treatment.

### Supplementary Note 1:

[0467] Custom Python script used for analysis of point mutations (SNVs) reported by Zuo et al. (13). Results of the analysis are depicted as sequence logos in FIGS. 5A-5B.

```
import pandas as pd
import Bio
from Bio import SeqIO
import glob
from Bio.Seq import Seq
from Bio.Alphabet import IUPAC
import glob
import os
from Bio.SeqRecord import SeqRecord
files = [x[5:] for x in glob.glob(‘data/*.csv’)]
chromosomes = [1,2,3,4,5,6,7,8,9,10,11,12,13,14,15,16,17,18,19,‘X’,‘Y’]
os.mkdir(‘data+flanks’)
for file in files:
  data = pd.read_csv(‘data/’ + file)
  flank_seqs = { }
  for chromosome in chromosomes:
    print file, chromosome
    dchr = data.loc[data[‘Chrom’] == ‘chr’ + str(chromosome)]
    record = SeqIO.read(‘mm10/chr’ + str(chromosome) + ‘.fa’, ‘fasta’)
    for index in dchr.index:
      flank_seqs[index] =
str(record.seq[int(dchr.loc[index][‘Pos’])−1−20:int(dchr.loc[index][‘Pos’])−
1+21])
  data[‘Flank_seqs’] = pd.Series(flank_seqs)
  data.to_csv(‘data+flanks/’ + file)
#reverse complement flanks for all G>something SNPs
#remove all nonC>T or G>A SNPs
files = [x[12:] for x in glob.glob(‘data+flanks/*.csv’)]
os.mkdir(‘data+flanks_C20_5p3p’)
for file in files:
  data = pd.read_csv(‘data+flanks/’ + file)
  data.dropna(subset=[‘Mutation’], inplace=True)
  flank_seqs = {int(index) : data.loc[index][‘Flank_seqs’] for index in
data.index}
  #find all G>something SNPs
  gdata = data[data[‘Mutation’].str.contains(‘G>’)]
  #reverse complement flanks for all G>something SNPs
  for index in gdata.index:
    flank_seqs[int(index)] = str(Seq(str(flank_seqs[index]),
IUPAC.unambiguous_dna).reverse_complement( ))
  data[‘Flank_seqs_C20_5p3p’] = pd.Series(flank_seqs)
  data = data[data[‘Mutation’].str.contains(‘C>T|G>A’)]
  data.to_csv(‘data+flanks_C20_5p3p/’ + file)
files = [x[21:] for x in glob.glob(‘data+flanks_C20_5p3p/*.csv’)]
df = pd.DataFrame( )
for file in files:
  df_new = pd.read_csv(‘data+flanks_C20_5p3p/’ + file)
  df = df.append(df_new)
df.drop(columns = [‘Unnamed: 0’, ‘Unnamed: 0.1’], inplace=True)
df.reset_index(inplace=True)
df.drop(columns = [‘index’], inplace=True)
sequences = [ ]
for index in df.index:
  record = SeqRecord(Seq(df.loc[index][‘Flank_seqs_C20_5p3p’],
IUPAC.unambiguous_dna), id=str(index))
  sequences.append(record)
SeqIO.write( sequences,‘data.fasta’,‘fasta’)
```

### Supplementary Note 2:

[0468] CRISPResso2 analysis of high-throughput sequencing data. Batch analysis mode (one batch for each unique amplicon and sgRNA combination analyzed) was used in all cases. Reads were filtered by minimum average quality score (phred33) before inclusion in analysis. The output file for each amplicon's results (Reference.NUCLEOTIDE_PERCENTAGE_SUMMARY.txt) were used to quantify C•G to T•A conversion frequencies, either at a subset of C's within the protospacer of interest (on-target editing and off-target editing of dSaCas9 R-loops) or throughout the amplicon (for quantification of deamination of ssDNA in vivo). For indel analysis, a window of 15 bases around the center of the protospacer was used to quantify indels using the output file “CRISPRessoBatch_quantification_of_editing_frequency.txt” for each amplicon.

```
#!/bin/bash
#requires following fastq file format: AMPLICON_sample-xxx.fastq.gz
#requires AR's standard amplicon naming convention
#organize into folders by amplicon
folders=(H2 H3 H4 R2 E1 FF FF1 SaH3)
for folder in ${folders[*]}; do
  mkdir −p $folder
  for file in $( ls ${folder}−* ); do
    mv $file ${folder}/${file}
  done
done
for amplicon in $( ls ); do
  cd $amplicon
  #create batch settings txt file
  echo r1′¥t′n >> ${amplicon}.txt
  #lookup sgRNA and amplicon sequence from standard files
  g=‘cat /guides+amplicons/${amplicon}_sgRNA.txt‘
  a=‘cat /guides+amplicons/${amplicon}_amplicon.txt‘
  #add r1's and names to batch settings txt file
  for sample in $( ls *.gz ); do
    echo ${sample}′¥t′${sample:0:$(expr ${#sample} − 9)} >>
${amplicon}.txt
  done
  #run crispressobatch
  docker run −v ${PWD}:/DATA −w /DATA −i pinellolab/crispresso2
CRISPRessoBatch −−batch_settings ${amplicon}.txt −g $g −a $a −w 30 −wc −10 −q 30
−p 12
  cd ..
done
```

### Supplementary Note 3:

[0469] Error propagation for kcat/Km ratio. The error in the kcat/Km ratio determined for each base editor was estimated by propagating the individual SEM values for the kcat and Km parameters estimated by the regression analysis using the following equation (60):

$$Δ ( \frac{{k}_{c a t}}{{K}_{m}} ) = \frac{{k}_{cat}}{{K}_{m}} \sqrt{{( \frac{Δ {k}_{cat}}{{k}_{c a t}} )}^{2} + {( \frac{Δ {K}_{m}}{{K}_{m}} )}^{2}}$$

### Supplementary Note 4:

[0470] Calculation of ClinVar pathogenic SNPs targetable by CBEs. The ClinVar database variant summary (updated May 2019) was used in conjunction with the NCBI dbSNP database in order to get flanking genomic contexts for each SNP correctable by a C•G-to-T•A conversion. These genomic contexts were used to define a SNP as targetable by a CBE if a PAM appropriate to that CBE exists that places the SNP in that CBE's editing window.

```
import numpy as np
import pandas as pd
import regex
import re
from Bio import SeqIO
import Bio
import os
###CHANGE PAM AND WINDOW INFO HERE###
PAMs = [‘NGG’]
windows = {‘NGG’: (4,14)}
###CHANGE PAM AND WINDOW INFO HERE###
def RC(seq):
  encoder = {‘A’:‘T’,‘T’:‘A’,‘C’:‘G’,‘G’:‘C’,‘N’:‘N’,‘R’:‘Y’,‘Y’:‘R’,
‘M’:‘K’, ‘K’:‘M’, ‘S’:‘S’, ‘W’:‘W’, ‘H’:‘D’, ‘B’:‘V’, ‘V’:‘B’, ‘D’:‘H’}
  rc = ‘’
  for n in reversed(seq):
    rc += encoder[n]
  return rc
def create_PAM(pam):
  encoder =
{‘A’:‘A’,‘T’:‘T’,‘G’:‘G’,‘C’:‘C’,‘R’:‘[A|G]’,‘Y’:‘[C|T]’,‘N’:‘[A|T|C|G]’,‘M’:‘[A
|C]’,‘K’:‘[G|T]’,‘S’:‘[C|G]’,‘’W’:‘[A|T]’,‘H’:‘[A|C|T]’,‘B’:‘[C|G|T]’,‘V’:‘[A|C|G
]’,‘D’:‘[A|G|T]’}
  enc_pam = {‘f’:‘’,‘r’:‘’}
  rc_pam = RC(pam)
  for n,m in zip(pam, rc_pam):
    enc_pam[‘f’] += encoder[n]
    enc_pam[‘r’] += encoder[m]
  return enc_pam
ClinVar=pd.read_csv(‘2019-05-06-variant_summary.csv’, encoding = “ISO-8859-1”)
Phenotypes=pd.read_csv(‘DiseaseNames.csv’)
PhenotypeDict=dict(zip(Phenotypes.CUI, Phenotypes.name))
#open flanking sequence fasta files for all Y-type pathogenic human SNPs
(includes both C>T and T>C ref>variant)
#downloaded as fasta file from:
#http://www.ncbi.nlm.nih.gov/snp/?term=((%22pathogenic %22%5BClinical+Significanc
e%5D+AND+%22snp%22%5BSNP+Class%5D+AND+homo+sapiens%5BOrganism %5D+)+AND(%22y%22%5
BAllele%5D))
handle = open(“YFasta.txt”, “rU”)
flanks={ }
#save as a dictionary keyed on rsID as an Integer with values being 25nt of
flanking sequence on each side of the SNP
for record in SeqIO.parse(handle, “fasta”) :
  flanks[int(record.id.split(“|”)[−
1].strip(‘rs’))]=regex.findall(‘.{25}[\hat{ }A,T,C,G].{25}’, record.seq.tostring( ) )
handle.close( )
# clinvar may refer to the opposite strand that was used in dbSNP;
# we want to allow clinvar reference alleles A and T with alternate alleles G
and C respectively
# we do not want to allow reference alleles G and C with alternate alleles A and
T respectively; these Y-type SNPs must be removed
ClinVar_mod=ClinVar[(ClinVar.ReferenceAllele==‘A’) |
(ClinVar.ReferenceAllele==‘T’)].drop_duplicates(‘#AlleleID’)
#merge flanking sequences to the CtoT frame on rsID
F=pd.DataFrame({‘RS# (dbSNP)’: list(flanks.keys( )), ‘Flanks’: [x for x in
flanks.values( )]})
CtoT=F.merge(ClinVar_mod, left_on=‘RS# (dbSNP)’, right_on=‘RS# (dbSNP)’,
how=‘inner’)
#open flanking sequence fasta files for all R-type pathogenic human SNPs
(includes both G>A and A>G ref>variant)
#downloaded as fasta file from:
#http://www.ncbi.nlm.nih.gov/snp/?term=((%22pathogenic%22%5BClinical+Significanc
e%5D+AND+%22snp%22%5BSNP+Class%5D+AND+homo+sapiens%5BOrganism%5D+)+AND(%22r%22%5
BAllele%5D))
handle = open(“RFasta.txt”, “rU”)
flanks={ }
#save as a dictionary keyed on rsID as an Integer with values being 25nt of
flanking sequence on each side of the SNP
for record in SeqIO.parse(handle, “fasta”) :
  flanks[int(record.id.split(“|”)[−
1].strip(‘rs’))]=regex.findall(‘.{25}[\hat{ }A,T,C,G].{25}’, record.seq.tostring( ))
handle.close( )
#merge flanking sequences to the CtoT frame on rsID
F=pd.DataFrame({‘RS# (dbSNP)’: list(flanks.keys( )), ‘Flanks’: [x for x in
flanks.values( )]})
GtoA=F.merge(ClinVar_mod, left_on=‘RS# (dbSNP)’, right_on=‘RS# (dbSNP)’,
how=‘inner’)
#empty lists to later combine data for all PAMs
hasPAM_CtoT_dfs =[ ]
hasPAM_GtoA_dfs =[ ]
singleC_CtoT_dfs = [ ]
singleC_GtoA_dfs = [ ]
os.chdir(‘output’)
for PAM in PAMs:
  #define window limits and the length of the pam including all N residues
  enc_pam = create_PAM(PAM)
  windowstart = windows[PAM][0]
  windowend = windows[PAM][1]
  windowlen=windowend−windowstart+1
  lenpam=len(PAM)
  CtoTmod = CtoT
  CtoTmod[‘gRNAs’]=None
  CtoTmod[‘gRNAall’]=None
  for i in range(len(CtoTmod)):
    print i
    if type(CtoTmod.iloc[i].Flanks)==list and
CtoTmod.iloc[i].Flanks!=[ ]:
      test=CtoTmod.iloc[i].Flanks[0]
      # define a potential gRNA spacer for each window
positioning
      gRNAoptions=[test[(26−windowstart−j):(26−windowstart−
j+lenpam+20)] for j in range(windowlen)]
      #if there is an appropriate PAM placed for a given gRNA
spacer
      #save tuple of gRNA spacer, and the position of off-target
Cs in the window
  gRNA=[(gRNAoptions[k],[x.start( )+1 for x in
re.finditer(‘C’,gRNAoptions[k]) if windowstart−1<x.start( )+1<windowend+1]) for k
in range(len(gRNAoptions)) if regex.match(enc_pam[‘f’], gRNAoptions[k][−
lenpam:])]
      gRNAsingleC=[ ]
      for g,c in gRNA:
        #if the target C is the only C in the window save
this as a single C site
        if g[windowstart−1:windowend].count (‘C’)==0:
          gRNAsingleC.append(g)
        #OPTIONAL uncomment the ELIF statement if you are
interest in filtered based upon position of off-target C
        #if the target C is expected to be editted more
efficiently than the off-target Cs, also save as a single C Site
        #elif all([p<priority[x] for x in c]):
          #gRNAsingleC.append(g)
      CtoTmod.gRNAs.iloc[i]=gRNAsingleC
      CtoTmod.gRNAall.iloc[i]=[g for g,c in gRNA]
  GtoAmod = GtoA
  GtoAmod[‘gRNAs’]=None
  GtoAmod[‘gRNAall’]=None
  for i in range(len(GtoAmod)):
    print i
    if type(GtoAmod.iloc[i].Flanks)==list and
GtoAmod.iloc[i].Flanks!=[ ]:
      test=Gt:oAmod.iloc[i].Flanks[0 ]
      gRNAoptions=[test[(25+windowstart+j−20−
lenpam):(25+windowstart+j)] for j in range(windowlen)]
      gRNA=[(gRNAoptions[k],[20+lenpam−x.start( ) for x in
re.finditer(‘G’,gRNAoptions[k]) if windowstart−1<20+lenpam−
x.start( )<windowend+1]) for k in range(len(gRNAoptions)) if
regex.match(enc_pam[‘r’], gRNAoptions[k][:lenpam])]
      gRNAsingleC=[ ]
      for g,c in gRNA:
        if g[20+lenpam−windowstart−windowlen+1:20+lenpam−
windowstart+1].count(‘G’)==0:
          gRNAsingleC.append(g)
        #elif all([p<priority[x] for x in c]):
          #gRNAsingleC.append(g)
      GtoAmod.gRNAs.iloc[i]=gRNAsingleC
      GtoAmod.gRNAall.iloc[i]=[g for g,c in gRNA]
  #merge in phenotypes based upon MedGen IDs; remove redundant columns
  CtoTmod=CtoTmod[[‘RS# (dbSNP)’,‘GeneSymbol’,‘Name’, ‘PhenotypeIDs’,
‘Origin’, ‘ReviewStatus’, ‘NumberSubmitters’, ‘LastEvaluated’, ‘gRNAs’,
‘gRNAall’]]
  ids=[re.findall(‘MedGen:C.{7}’, x) for x in CtoTmod.PhenotypeIDs.values]
  CtoTmod[‘Phenotypes']=[[PhenotypeDict[y.lstrip(‘MedGen:’)] for y in x if
y.lstrip(‘MedGen:’) in PhenotypeDict.keys( )] for x in ids]
  CtoTmod.drop(‘PhenotypeIDs', inplace=True, axis=1)
  GtoAmod=GtoAmod[[‘RS# (dbSNP)’,‘GeneSymbol’, ‘Name’, ‘PhenotypeIDs’,
‘Origin’, ‘ReviewStatus’, ‘NumberSubmitters’, ‘LastEvaluated’, ‘gRNAs’,
‘gRNAall’]]
  ids=[re.findall(‘MedGen:C.{7}’, x) for x in GtoAmod.PhenotypeIDs.values]
  GtoAmod[‘Phenotypes’]=[[PhenotypeDict[y.lstrip(‘MedGen:’)] for y in x if
y.lstrip(‘MedGen:’) in PhenotypeDict.keys( )] for x in ids]
  GtoAmod.drop(‘PhenotypeIDs’, inplace=True, axis=1)
  CtoTmod.to_csv(‘pathogenic_CtoT_all.csv’)
  GtoAmod.to_csv(‘pathogenic_GtoA_all.csv’)
  pathogenic_CtoT_hasPAM=CtoTmod[[type(x)==list and x!=[ ] for x in
CtoTmod.gRNAall]]
  pathogenic_GtoA_hasPAM=GtoAmod[[type(x)==list and x!=[ ] for x in
GtoAmod.gRNAall]]
  pathogenic_GtoA_hasPAM.to_csv(‘pathogenic_GtoA_has_’+PAM+‘_PAM.csv’)
  pathogenic_CtoT_hasPAM.to_csv(‘pathogenic_CtoT_has_’+PAM+‘_PAM.csv’)
  hasPAM_CtoT_dfs.append(pathogenic_CtoT_hasPAM)
  hasPAM_GtoA_dfs.append(pathogenic_GtoA_hasPAM)
  pathogenic_CtoT_SingleC=CtoTmod[[type(x)==list and x!=[ ] for x in
CtoTmod.gRNAs]]
  pathogenic_GtoA_SingleC=GtoAmod[[type(x)==list and x!=[ ] for x in
GtoAmod.gRNAs]]
  pathogenic_GtoA_SingleC.to_csv(‘pathogenic_GtoA_’+PAM+‘_PAM_SingleC.csv’)
  pathogenic_CtoT_SingleC.to_csv(‘pathogenic_CtoT_’+PAM+‘_PAM_SingleC.csv’)
  singleC_CtoT_dfs.append(pathogenic_CtoT_SingleC)
  singleC_GtoA_dfs.append(pathogenic_GtoA_SingleC)
  with open(‘Summary_’+PAM+‘.txt’, “w”) as text_file:
    text_file.write(“singleC %s \n” %
(len(pathogenic_CtoT_SingleC)+len(pathogenic_GtoA_SingleC)))
    text_file.write(“hasPAM %s \n” %
(len(pathogenic_CtoT_hasPAM)+len(pathogenic_GtoA_hasPAM)))
    text_file.write(“Pathogenic SNPs that can be targeted with BE %s”
% (len(CtoTmod)+len(GtoAmod)))
hasPAM_CtoT_alIPAMs = pd.concat(hasPAM_CtoT_dfs)
hasPAM_GtoA_allPAMs = pd.concat(hasPAM_GtoA_dfs)
singleC_CtoT_allPAMs = pd.concat(singleC_CtoT_dfs)
singleC_GtoA_allPAMs = pd.concat(singleC_GtoA_dfs)
#remove duplicates
hasPAM_CtoT_allPAMs =
hasPAM_CtoT_allPAMs[~hasPAM_CtoT_allPAMs.index.duplicated(keep=‘first’)]
hasPAM_GtoA_allPAMs =
hasPAM_GtoA_allPAMs[~hasPAM_GtoA_allPAMs.index.duplicated(keep=‘first’)]
singleC_CtoT_allPAMs =
singleC_CtoT_allPAMs[~singleC_CtoT_allPAMs.index.duplicated(keep=‘first’)]
singleC_GtoA_allPAMs =
singleC_GtoA_allPAMs[~singleC_GtoA_allPAMs.index.duplicated(keep=‘first’)]
with open(‘Summary_allPAMs.txt’, “w”) as text_file:
  text_file.write(“singleC %s \n” %
(len(singleC_CtoT_allPAMs)+len(singleC_GtoA_allPAMs)))
  text_file.write(“hasPAM %s \n” %
(len(hasPAM_CtoT_allPAMs)+len(hasPAM_GtoA_allPAMs)))
  text_file.write(“Pathogenic SNPs that can be targeted with BE %s” %
(len(CtoTmod)+len(GtoAmod)))
```

### REFERENCES

[0471] 1. A. C. Komor et al., Programmable editing of a target base in genomic DNA without double-stranded DNA cleavage. Nature 533, 420-424 (2016).
[0472] 2. A. C. Komor et al., Improved base excision repair inhibition and bacteriophage Mu Gam protein yields C:G-to-T:A base editors with higher efficiency and product purity. Science Advances 3, eaao4774 (2017).
[0473] 3. A. C. Komor, A. H. Badran, D. R. Liu, CRISPR-Based Technologies for the Manipulation of Eukaryotic Genomes. Cell 168, 20-36 (2017).
[0474] 4. H. A. Rees, D. R. Liu, Base editing: precision chemistry on the genome and transcriptome of living cells. Nat Rev Genet 19, 770-788 (2018).
[0475] 5. M. Paz Zafra et al., Optimized base editors enable efficient editing in cells, organoids and mice. Nature Biotechnology 36, 888-893 (2018).
[0476] 6. K. Kim et al., Highly efficient RNA-guided base editing in mouse embryos. Nat Biotechnol 35, 435-437 (2017).
[0477] 7. Y. Zhang et al., Programmable base editing of zebrafish genome using a modified CRISPR-Cas9 system. Nat Commun 8, 118 (2017).
[0478] 8. Y. Zong et al., Precise base editing in rice, wheat and maize with a Cas9-cytidine deaminase fusion. Nat Biotechnol 35, 438-440 (2017).
[0479] 9. N. M. Gaudelli et al., Programmable base editing of A*T to G*C in genomic DNA without DNA cleavage. Nature 551, 464-471 (2017).
[0480] 10. D. Kim et al., Genome-wide target specificities of CRISPR RNA-guided programmable deaminases. Nat Biotechnol 35, 475-480 (2017).
[0481] 11. P. Liang et al., Genome-wide profiling of adenine base editor specificity by EndoV-seq. Nature Communications 10, (2019).
[0482] 12. H. A. Rees et al., Improving the DNA specificity and applicability of base editing through protein engineering and protein delivery. Nat Commun 8, 15790 (2017).
[0483] 13. E. S. Zuo et al., Cytosine base editor generates substantial off-target single-nucleotide variants in mouse embryos. Science 364, 289-292 (2019).
[0484] 14. S. Z. Jin et al., Cytosine, but not adenine, base editors induce genome-wide off-target mutations in rice. Science 364, (2019).
[0485] 15. A. H. Badran, D. R. Liu, Development of potent in vivo mutagenesis plasmids with broad mutational spectra. Nat Commun 6, 8425 (2015).
[0486] 16. L. Garibyan, Use of the rpoB gene to determine the specificity of base substitution mutations on the Escherichia coli chromosome. DNA Repair 2, 593-608 (2003).
[0487] 17. R. S. Harris et al., RNA Editing Enzyme APOBEC1 and Some of Its Homologs Can Act as DNA Mutators. Molecular Cell 10, 1247-1253 (2002).
[0488] 18. R. M. Kohli et al., A portable hot spot recognition loop transfers sequence preferences from APOBEC family members to activation-induced cytidine deaminase. J Biol Chem 284, 22898-22904 (2009).
[0489] 19. H. Lee et al., Foster, Rate and molecular spectrum of spontaneous mutations in the bacterium Escherichia coli as determined by whole-genome sequencing. Proc Natl Acad Sci USA 109, E2774-2783 (2012).
[0490] 20. K. Fukui, DNA mismatch repair in eukaryotes and bacteria. J Nucleic Acids 2010, (2010).
[0491] 21. G. Saraconi et al., The RNA editing enzyme APOBEC1 induces somatic mutations and a compatible mutational signature is present in esophageal adenocarcinomas. Genome Biology 15, (2014).
[0492] 22. K. Nishida et al., Targeted nucleotide editing using hybrid prokaryotic and vertebrate adaptive immune systems. Science 353, aaf8729-aaf8729 (2016).
[0493] 23. Y. Ma et al., Targeted AID-mediated mutagenesis (TAM) enables efficient genomic diversification in mammalian cells. Nat Methods 13, 1029-1035 (2016).
[0494] 24. G. T. Hess et al., Directed evolution using dCas9-targeted somatic hypermutation in mammalian cells. Nat Methods 13, 1036-1042 (2016).
[0495] 25. X. Wang et al., Efficient base editing in methylated regions with a human APOBEC3A-Cas9 fusion. Nat Biotechnol 36, 946-949 (2018).
[0496] 26. M. A. Coelho et al., BE-FLARE: a fluorescent reporter of base editing activity reveals editing characteristics of APOBEC3A and APOBEC3B. BMC Biol 16, 150 (2018).
[0497] 27. A. St Martin et al., A fluorescent reporter for quantification and enrichment of DNA editing by APOBEC-Cas9 or cleavage by Cas9 in living cells. Nucleic Acids Res 46, e84 (2018).
[0498] 28. A. St Martin et al., A panel of eGFP reporters for single base editing by APOBEC-Cas9 editosome complexes. Sci Rep 9, 497 (2019).
[0499] 29. Z. Liu et al., Highly precise base editing with CC context-specificity using engineered human APOBEC3G-nCas9 fusions. Bioarchive, (2019).
[0500] 30. B. W. Thuronyi, et al., Continuous evolution of base editors with expanded target compatibility and improved activity. Nature Biotechnology 37, 1070-1079 (2019).
[0501] 31. Y. B. Kim et al., Increasing the genome-targeting scope and precision of base editing with engineered Cas9-cytidine deaminase fusions. Nat Biotechnol 35, 371-376 (2017).
[0502] 32. J. Grunewald et al., Transcriptome-wide off-target RNA editing induced by CRISPR-guided DNA base editors. Nature 569, 433-437 (2019).
[0503] 33. J. M. Gehrke et al., An APOBEC3A-Cas9 base editor with minimized bystander and off-target activities. Nature Biotechnology 36, 977-982 (2018).
[0504] 34. Y. Tashiro et al., A nucleoside kinase as a dual selector for genetic switches and circuits.

[0505] Nucleic Acids Res 39, e12 (2011).
[0506] 35. L. W. Koblan et al., Improving cytidine and adenine base editors by expression optimization and ancestral reconstruction. Nature Biotechnology 36, 843-846 (2018).
[0507] 36. K. Chan et al., An APOBEC3A hypermutation signature is distinguishable from the signature of background mutagenesis by APOBEC3B in human cancers. Nat Genet 47, 1067-1072 (2015).
[0508] 37. T. Eto et al., RNA-editing cytidine deaminase Apobec-1 is unable to induce somatic hypermutation in mammalian cells. PNAS 100, 12895-12898 (2003).
[0509] 38. M. A. Carpenter et al., Methylcytosine and normal cytosine deamination by the foreign DNA restriction enzyme APOBEC3A. J Biol Chem 287, 34801-34808 (2012).
[0510] 39. L. Lei et al., APOBEC3 induces mutations during repair of CRISPR-Cas9-generated DNA breaks. Nat Struct Mol Biol 25, 45-52 (2018).
[0511] 40. M. K. Akre et al., Mutation Processes in 293-Based Clones Overexpressing the DNA Cytidine deaminase APOBEC3B. PLoS One 11, e0155391 (2016).
[0512] 41. H. S. Nishimasu, et al., Engineered CRISPR-Cas9 nuclease with expanded targeting space. Science 361, 1259-1262 (2018).
[0513] 42. J. H. Hu et al., Evolved Cas9 variants with broad PAM compatibility and high DNA specificity. Nature 556, 57-63 (2018).
[0514] 43. T. P. Huang et al., Circularly permuted and PAM-modified Cas9 variants broaden the targeting scope of base editors. Nature Biotechnology 37, 626-631 (2019).
[0515] 44. S. Q. Tsai et al., GUIDE-seq enables genome-wide profiling of off-target cleavage by CRISPR-Cas nucleases. Nat Biotechnol 33, 187-197 (2015).
[0516] 45. C. Zhou et al., Off-target RNA mutation induced by DNA base editing and its elimination by mutagenesis. Nature, (2019).
[0517] 46. I. Martincorena, et al., High burden and pervasive positive selection of somatic mutations in normal human skin. Science 348, 880-885 (2015).
[0518] 47. J. L. Hazen et al., The Complete Genome Sequences, Unique Mutational Spectra, and Developmental Potency of Adult Neurons Revealed by Cloning. Neuron 89, 1223-1236 (2016).
[0519] 48. B. Milholland et al., Differences between germline and somatic mutation rates in humans and mice. Nat Commun 8, 15183 (2017).
[0520] 49. X. Dong et al., Accurate identification of single-nucleotide variants in whole-genome-amplified single cells. Nat Methods 14, 491-493 (2017).
[0521] 50. M. Lynch, Evolution of the mutation rate. Trends Genet 26, 345-352 (2010).
[0522] 51. R. Rahbari et al., Timing, rates and spectra of human germline mutation. Nat Genet 48, 126-133 (2016).
[0523] 52. L. C. Thomason et al., Recombineering: genetic engineering in bacteria using homologous recombination. Curr Protoc Mol Biol 106, 1 16 11-39 (2014).
[0524] 53. G. E. Crooks et al., WebLogo: A sequence logo generator. Genome Res. 14, 1188-1190 (2004).
[0525] 54. K. Clement et al., CRISPResso2: Accurate and Rapid Analysis of Genome Editing Data from Nucleases and Base Editors. Nature Biotechnology 37, 224-226 (2019).
[0526] 55. H. Li, R. Durbin, Fast and accurate short read alignment with Burrows-Wheeler transform.

[0527] Bioinformatics 25, 1754-1760 (2009).
[0528] 56. B. S. Pedersen, A. R. Quinlan, Mosdepth: quick coverage calculation for genomes and exomes. Bioinformatics 34, 867-868 (2018).
[0529] 57. G. A. Van der Auwera et al., From FastQ data to high confidence variant calls: the Genome Analysis Toolkit best practices pipeline. Curr Protoc Bioinformatics 43, 11-33 (2013).
[0530] 58. E. Garrison, G. Marth, Haplotype-based variant detection from short-read sequencing. arXiv preprint (2012).
[0531] 59. D. C. Koboldt et al., VarScan 2: somatic mutation and copy number alteration discovery in cancer by exome sequencing. Genome Res 22, 568-576 (2012).
[0532] 60. I. Farrance and R. Frenkel, Uncertainty of measurement: A review of the rules for calculating uncertainty components through functional relationships. Clin. Biochem. Rev. 33, 49-75 (2012).

### OTHER EMBODIMENTS

[0533] The foregoing has been a description of certain non-limiting embodiments of the disclosure. Those of ordinary skill in the art will appreciate that various changes and modifications to this description may be made without departing from the spirit or scope of the present disclosure, as defined in the following claims.

### EQUIVALENTS AND SCOPE

[0534] In the claims articles such as “a,” “an,” and “the” may mean one or more than one unless indicated to the contrary or otherwise evident from the context. Claims or descriptions that include “or” between one or more members of a group are considered satisfied if one, more than one, or all of the group members are present in, employed in, or otherwise relevant to a given product or process unless indicated to the contrary or otherwise evident from the context. The disclosure includes embodiments in which exactly one member of the group is present in, employed in, or otherwise relevant to a given product or process. The disclosure includes embodiments in which more than one, or all of the group members are present in, employed in, or otherwise relevant to a given product or process.

[0535] Furthermore, the disclosure encompasses all variations, combinations, and permutations in which one or more limitations, elements, clauses, and descriptive terms from one or more of the listed claims is introduced into another claim. For example, any claim that is dependent on another claim can be modified to include one or more limitations found in any other claim that is dependent on the same base claim. Where elements are presented as lists, e.g., in Markush group format, each subgroup of the elements is also disclosed, and any element(s) can be removed from the group. It should it be understood that, in general, where the disclosure, or aspects of the disclosure, is/are referred to as comprising particular elements and/or features, certain embodiments of the disclosure or aspects of the disclosure consist, or consist essentially of, such elements and/or features. For purposes of simplicity, those embodiments have not been specifically set forth in haec verba herein. It is also noted that the terms “comprising” and “containing” are intended to be open and permits the inclusion of additional elements or steps. Where ranges are given, endpoints are included. Furthermore, unless otherwise indicated or otherwise evident from the context and understanding of one of ordinary skill in the art, values that are expressed as ranges can assume any specific value or sub-range within the stated ranges in different embodiments of the disclosure, to the tenth of the unit of the lower limit of the range, unless the context clearly dictates otherwise.

[0536] This application refers to various issued patents, published patent applications, journal articles, and other publications, all of which are incorporated herein by reference. If there is a conflict between any of the incorporated references and the present disclosure, the disclosure shall control. In addition, any particular embodiment of the present disclosure that falls within the prior art may be explicitly excluded from any one or more of the claims. Because such embodiments are deemed to be known to one of ordinary skill in the art, they may be excluded even if the exclusion is not set forth explicitly herein. Any particular embodiment of the disclosure can be excluded from any claim, for any reason, whether or not related to the existence of prior art.

[0537] Those skilled in the art will recognize or be able to ascertain using no more than routine experimentation many equivalents to the specific embodiments described herein. The scope of the present embodiments described herein is not intended to be limited to the above Description, but rather is as set forth in the appended claims. Those of ordinary skill in the art will appreciate that various changes and modifications to this description may be made without departing from the spirit or scope of the present disclosure, as defined in the following claims.

What is claimed is:

1. A method of determining off-target editing frequency of a base editor comprising:
(a) contacting a nucleic acid molecule comprising a target sequence, with a first complex, wherein the first complex comprises (i) a cytosine base editor comprising a Cas9 domain, and (ii) a first guide RNA that is engineered to bind to the Cas9 domain of the cytosine base editor, wherein the first guide RNA comprises a first sequence of at least 10 contiguous nucleotides that is complementary to the target sequence;
(b) contacting the nucleic acid molecule with a second complex, wherein the second complex comprises (iii) a first nuclease inactive Cas9 (dCas9) protein, and (iv) a second guide RNA that is engineered to bind to the first dCas9 protein, wherein the second guide RNA comprises a second sequence of at least 10 contiguous nucleotides that is complementary to a third sequence, whereby the first complex and second complex generate two or more R-loops in the nucleic acid molecule, and
(c) sequencing at least a portion of the target sequence and/or at least a portion of the nucleic acid molecule comprising the third sequence.

2. The method of claim 1 further comprising contacting the nucleic acid molecule with a third, fourth, fifth, and/or sixth complex, wherein each of the third, fourth, fifth, and/or sixth complexes comprises (v) a second dCas9 protein, and (vi) a third guide RNA that is engineered to bind to the second dCas9 protein, wherein the third guide RNA comprises a fourth sequence of at least 10 contiguous nucleotides that is complementary to the third sequence.

3. The method of claim 2, wherein the second guide RNA and the third guide RNA are the same.

4. The method of any one of claims 1-3, wherein the third sequence has about 60% or less sequence identity to the target sequence.

5. The method of any one of claims 1-4, wherein the target sequence and the third sequence are within about 1000 nucleotides, 500 nucleotides, about 400 nucleotides, about 300 nucleotides, about 200 nucleotides, about 150 nucleotides, about 120 nucleotides, about 100 nucleotides, about 90 nucleotides, or about 75 nucleotides of one another.

6. The method of any one of claims 1-5, wherein the Cas9 domain is a Cas9 nickase.

7. The method of any one of claims 1-6, wherein the Cas9 domain is derived from a first bacterial species, and the first dCas9 protein and the second dCas9 protein are derived from a second bacterial species.

8. The method of any one of claims 1-7, wherein the first guide RNA comprises a sequence of at least 15 or at least 20 contiguous nucleotides that is complementary to the target sequence.

9. The method of any one of claims 1-8, wherein the second guide RNA and/or third guide RNA comprises a sequence of at least 15 or at least 20 contiguous nucleotides that is complementary to the third sequence.

10. The method of any one of claims 1-9, wherein the target sequence and the third sequence are comprised within the genome of a cell.

11. The method of any one of claims 1-10, wherein the target sequence and the third sequence are comprised within the genome of a mammalian cell.

12. The method of claim 10 or 11, wherein the step of contacting comprises transfecting the cell with one or more plasmids encoding the cytosine base editor, the first guide RNA, the first dCas9 protein, and the second guide RNA.

13. The method of claim 12, wherein the step of contacting comprises further transfecting the cell with one or more plasmids encoding the second dCas9 protein and the third guide RNA.

14. The method of claim 12 or 13, wherein the step of transfecting is performed using lipofection, nucleofection, or electroporation.

15. The method of any one of claims 7-14, wherein the first bacterial species is S. pyogenes.

16. The method of any one of claims 7-15, wherein the second bacterial species is S. aureus.

17. The method of any one of claims 10-16, wherein the cell is a population of cells.

18. The method of claim 17, wherein the step of sequencing comprises performing high-throughput sequencing of one or more portions of the genomes of the cells of the population.

19. The method of any one of claims 1-18, wherein the target sequence comprises a C:G nucleobase pair.

20. A system for determining off-target editing frequency of a base editor comprising:
one or more eukaryotic cells each comprising i) a first nucleic acid molecule encoding a cytosine base editor comprising a Cas9 domain; (ii) a second nucleic acid molecule encoding a first guide RNA that is engineered to bind to the Cas9 domain of the cytosine base editor, wherein the first guide RNA comprises a first sequence of at least 10 contiguous nucleotides that is complementary to a target sequence; (iii) a third nucleic acid molecule encoding a nuclease inactive Cas9 (dCas9) protein; and (iv) a fourth nucleic acid molecule encoding a second gRNA that is engineered to bind to the dCas9 protein, wherein the second guide RNA comprises a second sequence of at least 10 contiguous nucleotides that is complementary to a third sequence, whereby the first complex and second complex generate two or more R-loops in the nucleic acid molecule, and
wherein the third sequence has about 60% or less sequence identity to the target sequence.

21. The system of claim 20, wherein the target sequence comprises a C:G nucleobase pair.

22. The system of claim 20 or 21, wherein the Cas9 domain is a Cas9 nickase.

23. The system of any one of claims 20-22, wherein the Cas9 domain is derived from a first bacterial species, and the dCas9 protein is derived from a second bacterial species.

24. The system of claim 23, wherein the first bacterial species is S. pyogenes, and the second bacterial species is S. aureus.

25. The system of any one of claims 20-24, wherein the eukaryotic cells comprise mammalian cells.

26. A base editor comprising a) a cytidine deaminase domain, b) a napDNAbp domain, c) one or more nuclear localization signals, and d) two or more uracil glycosylase inhibitor (UGI) domains, wherein the cytidine deaminase domain is selected from YE1, YE2, YEE, EE, R33A, R33A+K34A, AALN, A3A, eA3A, A3G, and variants thereof.

27. The base editor of claim 26, wherein the napDNAbp domain is selected from a Cas9, a Cpf1, a CasX, a CasY, a C2c1, a C2c2, a C2c3, a GeoCas9, a CjCas9, a Cas12a, a Cas12b, a Cas12g, a Cas12h, a Cas12i, a Cas13b, a Cas13c, a Cas13d, a Cas14, a Csn2, an xCas9, an SpCas9-NG, a circularly permuted Cas9, an Argonaute (Ago) domain, Cas9-KKH, SmacCas9, Spy-macCas9, an SpCas9-NRRH, an SpCas9-NRCH, an SpCas9-NRTH, and variants thereof.

28. The base editor of claim 26 or 27, wherein the napDNAbp domain has nuclease activity, has nickase activity, or has no nuclease or nickase activity.

29. The base editor of claim 28, wherein the napDNAbp domain is a dCas9.

30. The base editor of claim 29, wherein the dCas9 comprises the amino acid sequence set forth in SEQ ID NO: 214.

31. The base editor of claim 28, wherein the napDNAbp domain is a Cas9 nickase (nCas9).

32. The base editor of claim 30, wherein the Cas9 nickase comprises the amino acid sequence set forth in SEQ ID NO: 215.

33. The base editor of claim 26 or 27, wherein the napDNAbp domain is a circularly permuted Cas9.

34. The base editor of claim 33, wherein the circularly permuted Cas9 is CP1028.

35. The base editor of claim 26 or 27, wherein the napDNAbp domain is an SpCas9-NG.

36. The base editor of any one of claims 26-35, wherein the napDNAbp domain is selected from any one of the amino acid sequences set forth in SEQ ID NOs: 213-229 or 235-237.

37. The base editor of any one of claims 26-36, wherein the base editor comprises two UGI domains.

38. The base editor of any one of claims 26-37, wherein the two or more nuclear localization sequences (NLS) comprises the amino acid sequence KRTADGSEFESPKKKRKV (SEQ ID NO: 285) or KRTADGSEFEPKKKRKV (SEQ ID NO: 286).

39. The base editor of any one of claims 26-38, wherein the base editor comprises the structure: NH₂-[first nuclear localization sequence]-[cytidine deaminase domain]-[napDNAbp domain]-[first UGI domain]-[second UGI domain]-[second nuclear localization sequence]-COOH, wherein each instance of “]-[” indicates the presence of an optional linker sequence.

40. The base editor of claim 39, wherein the cytidine deaminase domain and the napDNAbp domain are linked via a linker comprising the amino acid sequence SGGSSGGSSGSETPGTSESATPESSGGSSGGS (SEQ ID NO: 301); the napDNAbp domain and the first UGI domain are linked via a linker comprising the amino acid sequence of SGGSGGSGGS (SEQ ID NO: 302); the first UGI domain and the second UGI domain are linked via a linker comprising the amino acid sequence of SGGSGGSGGS (SEQ ID NO: 302); and/or the second UGI domain and the second nuclear localization sequence are linked via a linker comprising the amino acid sequence of SGGS (SEQ ID NO: 303).

41. The base editor of any one of claims 26-40, wherein the cytidine deaminase domain comprises YE1.

42. The base editor of any one of claims 26-40, wherein the cytidine deaminase domain is selected from YE1, YE2, YEE, EE, R33A, or R33A+K34A and variants thereof, and the napDNAbp domain is selected from an nCas9, an xCas9, an SpCas9-NG, or a CP1028.

43. The base editor of any one of claims 26-42, wherein the cytidine deaminase domain is YE1 and the napDNAbp domain is selected from an nCas9 or a CP1028.

44. The base editor of any one of claims 26-43, wherein the base editor comprises an amino acid sequence that has at least 85% sequence identity, at least 90% sequence identity, at least 95% sequence identity, at least 97.5% sequence identity, or at least 99.5% sequence identity to any one of SEQ ID NOs: 257-282.

45. The base editor of any one of claims 26-44, wherein the base editor comprises any one of the amino acid sequences set forth in SEQ ID NOs: 257-282.

46. The base editor of any one of claims 26-45, wherein the base editor is codon-optimized for expression in human cells.

47. The base editor any one of claims 26-46, wherein the base editor provides an off-target editing frequency of less than 1.5% after being contacted with a nucleic acid molecule comprising a target sequence.

48. A method for editing a target nucleobase pair comprising:
contacting a target sequence in a nucleic acid molecule with the base editor of any one of claims 26-47, and a guide RNA (gRNA);
deaminating a cytosine in a target nucleobase pair within the target sequence, and
obtaining a frequency of off-target editing of less than 1.5%.

49. The method of claim 48, wherein the off-target editing frequency is less than 1.25%, less than 1.1%, less than 1%, less than 0.75%, less than 0.5%, less than 0.4%, less than 0.25%, less than 0.2%, less than 0.15%, less than 0.1%, less than 0.05%, or less than 0.025%.

50. The method of claim 48 or 49, wherein the off-target editing frequency is about 0.4% or less.

51. The method of any one of claims 48-50, further comprising obtaining a frequency of editing of less than 1.5% in sequences having 60% or less sequence identity to the target sequence.

52. The method of any one of claims 48-51 further comprising obtaining an on-target editing frequency of greater than 50% at the target nucleobase pair.

53. The method of any one of claims 48-52 further comprising obtaining an on-target editing frequency of greater than 65% at the target nucleobase pair.

54. The method of any one of claims 48-53 further comprising obtaining an on-target editing frequency of greater than 85% at the target nucleobase pair.

55. The method of any one of claims 48-54, wherein the step of contacting results in an indel frequency of less than 0.75%, less than 0.6%, less than 0.5%, less than 0.4%, less than 0.3%, or less than 0.2% in the nucleic acid molecule.

56. The method of any one of claims 48-55, wherein the step of contacting results in an indel frequency of 0.5% or less in the nucleic acid molecule.

57. The method of any one of claims 48-56, wherein the gRNA comprises a sequence of at least 10, at least 15, or at least 20 contiguous nucleotides that is complementary to the target sequence.

58. The method of any one of claims 48-57, wherein the step of contacting is performed in vitro.

59. The method of any one of claims 48-58, wherein the step of contacting is performed in vivo in a subject.

60. The method of claim 59, wherein the subject is a human.

61. The method of any one of claims 48-60, wherein the target sequence is in the genome of an organism.

62. The method of claim 61, wherein the organism is bacteria.

63. The method of claim 61, wherein the organism is a eukaryote.

64. The method of claim 63, wherein the organism is a plant or a fungus.

65. The method of claim 63, wherein the organism is a vertebrate.

66. The method of claim 65, wherein the vertebrate is a mammal.

67. The method of claim 66, wherein the mammal is a mouse, a rat, or a human.

68. The method of claim 67, wherein the mammal is a human.

69. The method of any one of claims 48-68, wherein the nucleic acid molecule is double-stranded DNA.

70. The method of any one of claims 48-69, wherein the target sequence comprises a sequence associated with a disease or disorder.

71. The method of any one of claims 48-70, wherein the target sequence comprises a point mutation associated with a disease or disorder.

72. The method of claim 71, wherein the point mutation is a T-to-C or an A-to-G mutation.

73. The method of claim 71 or 72, wherein the step of contacting results in a correction of the point mutation.

74. The method of claim 59, wherein the subject has a T-to-C, or an A-to-G mutation, that is associated with a disease, disorder, or condition.

75. The method of claim 74, wherein the C of the T-to-C mutation is converted to a T.

76. The method of claim 74, wherein the G of the A-to-G mutation is converted to an A.

77. The method of any one of claims 48-76, wherein the base editor and gRNA are administered as a protein:RNA complex.

78. A polynucleotide encoding the base editor of any one of claims 26-47.

79. A vector comprising the polynucleotide of claim 78.

80. The vector of claim 79, wherein the vector comprises a heterologous promoter driving expression of the polynucleotide.

81. A complex comprising the base editor of any one of claims 26-47 in association with a guide RNA.

82. The complex of claim 81, wherein the guide RNA is 15-100 nucleotides long and comprises a sequence of at least 10, at least 15, or at least 20 contiguous nucleotides that is complementary to a target sequence.

83. A cell comprising the base editor of any one of claims 26-47.

84. A cell comprising the polynucleotide of claim 78.

85. A cell comprising the vector of claim 79 or 80.

86. A cell comprising the complex of claim 81 or 82.

87. A pharmaceutical composition comprising the base editor of any one of claims 26-47 and a pharmaceutically acceptable excipient.

88. A pharmaceutical composition comprising the polynucleotide of claim 78 and a pharmaceutically acceptable excipient.

89. A pharmaceutical composition comprising the vector of claim 79 or 80, and a pharmaceutically acceptable excipient.

90. A pharmaceutical composition comprising the complex of claim 81 or 82, and a pharmaceutically acceptable excipient.

91. A kit comprising a nucleic acid construct comprising:
(i) a nucleic acid sequence encoding the base editor of any one of claims 26-47;
(ii) a nucleic acid sequence encoding a gRNA; and
(iii) one or more heterologous promoters that drive the expression of the sequence of (i) and/or the sequence of (ii).

92. The kit of claim 91 further comprising an expression construct encoding a guide RNA backbone, wherein the construct comprises a cloning site positioned to allow the cloning of a nucleic acid sequence identical or complementary to a target sequence into the guide RNA backbone.

93. A kit comprising a nucleic acid construct comprising:
(i) a nucleic acid sequence encoding a cytosine base editor comprising a Cas9 domain;
(ii) a nucleic acid sequence encoding a first gRNA that is engineered to bind to the Cas9 domain of the cytosine base editor, wherein the second guide RNA comprises a first sequence of at least 10 contiguous nucleotides that is complementary to a target sequence;
(iii) a nucleic acid sequence encoding a first nuclease inactive Cas9 (dCas9) protein; and
(iv) a nucleic acid sequence encoding a second gRNA that is engineered to bind to the dCas9 protein, wherein the second guide RNA comprises a second sequence of at least 10 contiguous nucleotides that is complementary to a third sequence, wherein the third sequence has about 60% or less sequence identity to the target sequence.

94. The kit of claim 93 further comprising a nucleic acid construct comprising:
(v) a nucleic acid sequence encoding a second dCas9 protein; and
(vi) a nucleic acid sequence encoding a third gRNA that is engineered to bind to a second dCas9 protein, wherein the third guide RNA comprises a fourth sequence of at least 10 contiguous nucleotides that is complementary to the third sequence.

95. A system for determining off-target editing frequency of a base editor, comprising one or more prokaryotic cells comprising:
(i) a nucleic acid molecule that contains a target sequence within a first inactive antibiotic resistance gene, wherein the target sequence within the first inactive antibiotic resistance gene contains a first mutant nucleotide base that yields an active antibiotic resistance gene conferring resistance to a first antibiotic when the first mutant nucleotide base is mutated to a different nucleotide base;
(ii) a second nucleic acid molecule that contains a non-target sequence within a second inactive antibiotic resistance gene, wherein the non-target sequence within the second inactive antibiotic resistance gene contains a second mutant nucleotide base that yields an active antibiotic resistance gene conferring resistance to a second antibiotic when the second mutant nucleotide base is mutated to a different base; and
(iii) a third nucleic acid molecule encoding a cytosine base editor and a guide RNA comprising a sequence of at least 10 contiguous nucleotides that is complementary to the target sequence within the first inactive antibiotic resistance gene.

96. The system of claim 95, wherein the first nucleic acid molecule of (i) is comprised within a plasmid.

97. The system of claim 95 or 96, wherein the second nucleic acid molecule of (ii) is comprised in the genome of the one or more prokaryotic cells.

98. The system of any one of claims 95-97, wherein the first mutant nucleotide is a cytosine and wherein mutating the cytosine to a thymine yields an active antibiotic resistance gene conferring resistance to the first antibiotic.

99. The system of any one of claims 95-98, wherein the second mutant nucleotide is a cytosine and wherein mutating the cytosine to a thymine yields an active antibiotic resistance gene conferring resistance to the second antibiotic.

100. The system of any one of claims 95-99, wherein the first antibiotic is chloramphenicol.

101. The system of any one of claims 95-100, wherein the second antibiotic is rifampin.

102. The system of any one of claims 95-101, wherein the cytosine base editor comprises a nuclease inactive Cas9 (dCas9) domain.

103. A method of determining off-target editing frequency of a base editor in accordance with the system of any one of claims 95-102 comprising:
contacting a prokaryotic cell that comprises the second nucleic acid molecule, with
(i) the first nucleic acid molecule and
(ii) the third nucleic acid molecule; and
further contacting the prokaryotic cell with a growth medium comprising the second antibiotic and/or the first antibiotic.

104. The method of claim 103, wherein the second nucleic acid molecule is in the genome of the prokaryotic cell.

105. Use of (a) the base editor of any one of claims 26-47, and (b) a guide RNA targeting the base editor of (a) to a target C:G nucleobase pair in DNA editing.

106. The base editor of any one of claims 26-47, a complex of claim 81 or 82, or a pharmaceutical composition of any one of claims 87-90, for use as a medicament.

107. A method of determining off-target editing frequency of a base editor comprising:
(a) contacting a nucleic acid molecule comprising a target sequence, with a first complex, wherein the first complex comprises (i) an adenine base editor comprising a Cas9 domain, and (ii) a first guide RNA that is engineered to bind to the Cas9 domain of the adenine base editor, wherein the first guide RNA comprises a first sequence of at least 10 contiguous nucleotides that is complementary to the target sequence;
(b) contacting the nucleic acid molecule with a second complex, wherein the second complex comprises (iii) a first nuclease inactive Cas9 (dCas9) protein, and (iv) a second guide RNA that is engineered to bind to the first dCas9 protein, wherein the second guide RNA comprises a second sequence of at least 10 contiguous nucleotides that is complementary to a third sequence, whereby the first complex and second complex generate two or more R-loops in the nucleic acid molecule, and
(c) sequencing at least a portion of the target sequence and/or at least a portion of the nucleic acid molecule comprising the third sequence.

108. A system for determining off-target editing frequency of a base editor comprising:
one or more eukaryotic cells each comprising i) a first nucleic acid molecule encoding an adenine base editor comprising a Cas9 domain; (ii) a second nucleic acid molecule encoding a first guide RNA that is engineered to bind to the Cas9 domain of the adenine base editor, wherein the first guide RNA comprises a first sequence of at least 10 contiguous nucleotides that is complementary to a target sequence; (iii) a third nucleic acid molecule encoding a nuclease inactive Cas9 (dCas9) protein; and (iv) a fourth nucleic acid molecule encoding a second gRNA that is engineered to bind to the dCas9 protein, wherein the second guide RNA comprises a second sequence of at least 10 contiguous nucleotides that is complementary to a third sequence, whereby the first complex and second complex generate two or more R-loops in the nucleic acid molecule, and
wherein the third sequence has about 60% or less sequence identity to the target sequence.

The application's sequence listing, which the Patent Office published only in electronic form, follows.

SEQUENCE LISTING (303 sequences)

SEQ ID NO: 1 - DNA, 4104 bp, Streptococcus pyogenes
atggataaaaaatatagcattggcctggatattggcaccaacagcgtgggctgggcggtgattaccgatgaatataaagtgccgagcaaaaaatttaaagtgctgggcaacaccgatcgccatagcattaaaaaaaacctgattggcgcgctgctgtttgatagcggcgaaaccgcggaagcgacccgcctgaaacgcaccgcgcgccgccgctatacccgccgcaaaaaccgcatttgctatctgcaggaaatttttagcaacgaaatggcgaaagtggatgatagcttttttcatcgcctggaagaaagctttctggtggaagaagataaaaaacatgaacgccatccgatttttggcaacattgtggatgaagtggcgtatcatgaaaaatatccgaccatttatcatctgcgcaaaaaactggtggatagcaccgataaagcggatctgcgcctgatttatctggcgctggcgcatatgattaaatttcgcggccattttctgattgaaggcgatctgaacccggataacagcgatgtggataaactgtttattcagctggtgcagacctataaccagctgtttgaagaaaacccgattaacgcgagcggcgtggatgcgaaagcgattctgagcgcgcgcctgagcaaaagccgccgcctggaaaacctgattgcgcagctgccgggcgaaaaaaaaaacggcctgtttggcaacctgattgcgctgagcctgggcctgaccccgaactttaaaagcaactttgatctggcggaagatgcgaaactgcagctgagcaaagatacctatgatgatgatctggataacctgctggcgcagattggcgatcagtatgcggatctgtttctggcggcgaaaaacctgagcgatgcgattctgctgagcgatattctgcgcgtgaacaccgaaattaccaaagcgccgctgagcgcgagcatgattaaacgctatgatgaacatcatcaggatctgaccctgctgaaagcgctggtgcgccagcagctgccggaaaaatataaagaaattttttttgatcagagcaaaaacggctatgcgggctatattgatggcggcgcgagccaggaagaattttataaatttattaaaccgattctggaaaaaatggatggcaccgaagaactgctggtgaaactgaaccgcgaagatctgctgcgcaaacagcgcacctttgataacggcagcattccgcatcagattcatctgggcgaactgcatgcgattctgcgccgccaggaagatttttatccgtttctgaaagataaccgcgaaaaaattgaaaaaattctgacctttcgcattccgtattatgtgggcccgctggcgcgcggcaacagccgctttgcgtggatgacccgcaaaagcgaagaaaccattaccccgtggaactttgaagaagtggtggataaaggcgcgagcgcgcagagctttattgaacgcatgaccaactttgataaaaacctgccgaacgaaaaagtgctgccgaaacatagcctgctgtatgaatattttaccgtgtataacgaactgaccaaagtgaaatatgtgaccgaaggcatgcgcaaaccggcgtttctgagcggcgaacagaaaaaagcgattgtggatctgctgtttaaaaccaaccgcaaagtgaccgtgaaacagctgaaagaagattattttaaaaaaattgaatgctttgatagcgtggaaattagcggcgtggaagatcgctttaacgcgagcctgggcacctatcatgatctgctgaaaattattaaagataaagattttctggataacgaagaaaacgaagatattctggaagatattgtgctgaccctgaccctgtttgaagatcgcgaaatgattgaagaacgcctgaaaacctatgcgcatctgtttgatgataaagtgatgaaacagctgaaacgccgccgctataccggctggggccgcctgagccgcaaactgattaacggcattcgcgataaacagagcggcaaaaccattctggattttctgaaaagcgatggctttgcgaaccgcaactttatgcagctgattcatgatgatagcctgacctttaaagaagatattcagaaagcgcaggtgagcggccagggcgatagcctgcatgaacatattgcgaacctggcgggcagcccggcgattaaaaaaggcattctgcagaccgtgaaagtggtggatgaactggtgaaagtgatgggccgccataaaccggaaaacattgtgattgaaatggcgcgcgaaaaccagaccacccagaaaggccagaaaaacagccgcgaacgcatgaaacgcattgaagaaggcattaaagaactgggcagccagattctgaaagaacatccggtggaaaacacccagctgcagaacgaaaaactgtatctgtattatctgcagaacggccgcgatatgtatgtggatcaggaactggatattaaccgcctgagcgattatgatgtggatcatattgtgccgcagagctttctgaaagatgatagcattgataacaaagtgctgacccgcagcgataaaaaccgcggcaaaagcgataacgtgccgagcgaagaagtggtgaaaaaaatgaaaaactattggcgccagctgctgaacgcgaaactgattacccagcgcaaatttgataacctgaccaaagcggaacgcggcggcctgagcgaactggataaagcgggctttattaaacgccagctggtggaaacccgccagattaccaaacatgtggcgcagattctggatagccgcatgaacaccaaatatgatgaaaacgataaactgattcgcgaagtgaaagtgattaccctgaaaagcaaactggtgagcgattttcgcaaagattttcagttttataaagtgcgcgaaattaacaactatcatcatgcgcatgatgcgtatctgaacgcggtggtgggcaccgcgctgattaaaaaatatccgaaactggaaagcgaatttgtgtatggcgattataaagtgtatgatgtgcgcaaaatgattgcgaaaagcgaacaggaaattggcaaagcgaccgcgaaatattttttttatagcaacattatgaacttttttaaaaccgaaattaccctggcgaacggcgaaattcgcaaacgcccgctgattgaaaccaacggcgaaaccggcgaaattgtgtgggataaaggccgcgattttgcgaccgtgcgcaaagtgctgagcatgccgcaggtgaacattgtgaaaaaaaccgaagtgcagaccggcggctttagcaaagaaagcattctgccgaaacgcaacagcgataaactgattgcgcgcaaaaaagattgggatccgaaaaaatatggcggctttgatagcccgaccgtggcgtatagcgtgctggtggtggcgaaagtggaaaaaggcaaaagcaaaaaactgaaaagcgtgaaagaactgctgggcattaccattatggaacgcagcagctttgaaaaaaacccgattgattttctggaagcgaaaggctataaagaagtgaaaaaagatctgattattaaactgccgaaatatagcctgtttgaactggaaaacggccgcaaacgcatgctggcgagcgcgggcgaactgcagaaaggcaacgaactggcgctgccgagcaaatatgtgaactttctgtatctggcgagccattatgaaaaactgaaaggcagcccggaagataacgaacagaaacagctgtttgtggaacagcataaacattatctggatgaaattattgaacagattagcgaatttagcaaacgcgtgattctggcggatgcgaacctggataaagtgctgagcgcgtataacaaacatcgcgataaaccgattcgcgaacaggcggaaaacattattcatctgtttaccctgaccaacctgggcgcgccggcggcgtttaaatattttgataccaccattgatcgcaaacgctataccagcaccaaagaagtgctggatgcgaccctgattcatcagagcattaccggcctgtatgaaacccgcattgatctgagccagctgggcggcgat

SEQ ID NO: 2 - DNA, 4104 bp, Streptococcus pyogenes
atggataagaaatactcaataggcttagatatcggcacaaatagcgtcggatgggcggtgatcactgatgattataaggttccgtctaaaaagttcaaggttctgggaaatacagaccgccacagtatcaaaaaaaatcttataggggctcttttatttggcagtggagagacagcggaagcgactcgtctcaaacggacagctcgtagaaggtatacacgtcggaagaatcgtatttgttatctacaggagattttttcaaatgagatggcgaaagtagatgatagtttctttcatcgacttgaagagtcttttttggtggaagaagacaagaagcatgaacgtcatcctatttttggaaatatagtagatgaagttgcttatcatgagaaatatccaactatctatcatctgcgaaaaaaattggcagattctactgataaagcggatttgcgcttaatctatttggccttagcgcatatgattaagtttcgtggtcattttttgattgagggagatttaaatcctgataatagtgatgtggacaaactatttatccagttggtacaaatctacaatcaattatttgaagaaaaccctattaacgcaagtagagtagatgctaaagcgattctttctgcacgattgagtaaatcaagacgattagaaaatctcattgctcagctccccggtgagaagagaaatggcttgtttgggaatctcattgctttgtcattgggattgacccctaattttaaatcaaattttgatttggcagaagatgctaaattacagctttcaaaagatacttacgatgatgatttagataatttattggcgcaaattggagatcaatatgctgatttgtttttggcagctaagaatttatcagatgctattttactttcagatatcctaagagtaaatagtgaaataactaaggctcccctatcagcttcaatgattaagcgctacgatgaacatcatcaagacttgactcttttaaaagctttagttcgacaacaacttccagaaaagtataaagaaatcttttttgatcaatcaaaaaacggatatgcaggttatattgatgggggagctagccaagaagaattttataaatttatcaaaccaattttagaaaaaatggatggtactgaggaattattggtgaaactaaatcgtgaagatttgctgcgcaagcaacggacctttgacaacggctctattccccatcaaattcacttgggtgagctgcatgctattttgagaagacaagaagacttttatccatttttaaaagacaatcgtgagaagattgaaaaaatcttgacttttcgaattccttattatgttggtccattggcgcgtggcaatagtcgttttgcatggatgactcggaagtctgaagaaacaattaccccatggaattttgaagaagttgtcgataaaggtgcttcagctcaatcatttattgaacgcatgacaaactttgataaaaatcttccaaatgaaaaagtactaccaaaacatagtttgctttatgagtattttacggtttataacgaattgacaaaggtcaaatatgttactgagggaatgcgaaaaccagcatttctttcaggtgaacagaagaaagccattgttgatttactcttcaaaacaaatcgaaaagtaaccgttaagcaattaaaagaagattatttcaaaaaaatagaatgttttgatagtgttgaaatttcaggagttgaagatagatttaatgcttcattaggcgcctaccatgatttgctaaaaattattaaagataaagattttttggataatgaagaaaatgaagatatcttagaggatattgttttaacattgaccttatttgaagatagggggatgattgaggaaagacttaaaacatatgctcacctctttgatgataaggtgatgaaacagcttaaacgtcgccgttatactggttggggacgtttgtctcgaaaattgattaatggtattagggataagcaatctggcaaaacaatattagattttttgaaatcagatggttttgccaatcgcaattttatgcagctgatccatgatgatagtttgacatttaaagaagatattcaaaaagcacaggtgtctggacaaggccatagtttacatgaacagattgctaacttagctggcagtcctgctattaaaaaaggtattttacagactgtaaaaattgttgatgaactggtcaaagtaatggggcataagccagaaaatatcgttattgaaatggcacgtgaaaatcagacaactcaaaagggccagaaaaattcgcgagagcgtatgaaacgaatcgaagaaggtatcaaagaattaggaagtcagattcttaaagagcatcctgttgaaaatactcaattgcaaaatgaaaagctctatctctattatctacaaaatggaagagacatgtatgtggaccaagaattagatattaatcgtttaagtgattatgatgtcgatcacattgttccacaaagtttcattaaagacgattcaatagacaataaggtactaacgcgttctgataaaaatcgtggtaaatcggataacgttccaagtgaagaagtagtcaaaaagatgaaaaactattggagacaacttctaaacgccaagttaatcactcaacgtaagtttgataatttaacgaaagctgaacgtggaggtttgagtgaacttgataaagctggttttatcaaacgccaattggttgaaactcgccaaatcactaagcatgtggcacaaattttggatagtcgcatgaatactaaatacgatgaaaatgataaacttattcgagaggttaaagtgattaccttaaaatctaaattagtttctgacttccgaaaagatttccaattctataaagtacgtgagattaacaattaccatcatgcccatgatgcgtatctaaatgccgtcgttggaactgctttgattaagaaatatccaaaacttgaatcggagtttgtctatggtgattataaagtttatgatgttcgtaaaatgattgctaagtctgagcaagaaataggcaaagcaaccgcaaaatatttcttttactctaatatcatgaacttcttcaaaacagaaattacacttgcaaatggagagattcgcaaacgccctctaatcgaaactaatggggaaactggagaaattgtctgggataaagggcgagattttgccacagtgcgcaaagtattgtccatgccccaagtcaatattgtcaagaaaacagaagtacagacaggcggattctccaaggagtcaattttaccaaaaagaaattcggacaagcttattgctcgtaaaaaagactgggatccaaaaaaatatggtggttttgatagtccaacggtagcttattcagtcctagtggttgctaaggtggaaaaagggaaatcgaagaagttaaaatccgttaaagagttactagggatcacaattatggaaagaagttcctttgaaaaaaatccgattgactttttagaagctaaaggatataaggaagttaaaaaagacttaatcattaaactacctaaatatagtctttttgagttagaaaacggtcgtaaacggatgctggctagtgccggagaattacaaaaaggaaatgagctggctctgccaagcaaatatgtgaattttttatatttagctagtcattatgaaaagttgaagggtagtccagaagataacgaacaaaaacaattgtttgtggagcagcataagcattatttagatgagattattgagcaaatcagtgaattttctaagcgtgttattttagcagatgccaatttagataaagttcttagtgcatataacaaacatagagacaaaccaatacgtgaacaagcagaaaatattattcatttatttacgttgacgaatcttggagctcccgctgcttttaaatattttgatacaacaattgatcgtaaacgatatacgtctacaaaagaagttttagatgccactcttatccatcaatccatcactggtctttatgaaacacgcattgatttgagtcagctaggaggtgactga

SEQ ID NO: 3 - protein, 1367 aa, Streptococcus pyogenes
MDKKYSIGLDIGTNSVGWAVITDDYKVPSKKFKVLGNTDRHSIKKNLIGALLFGSGETAEATRLKRTARRRYTRRKNRICYLQEIFSNEMAKVDDSFFHRLEESFLVEEDKKHERHPIFGNIVDEVAYHEKYPTIYHLRKKLADSTDKADLRLIYLALAHMIKFRGHFLIEGDLNPDNSDVDKLFIQLVQIYNQLFEENPINASRVDAKAILSARLSKSRRLENLIAQLPGEKRNGLFGNLIALSLGLTPNFKSNFDLAEDAKLQLSKDTYDDDLDNLLAQIGDQYADLFLAAKNLSDAILLSDILRVNSEITKAPLSASMIKRYDEHHQDLTLLKALVRQQLPEKYKEIFFDQSKNGYAGYIDGGASQEEFYKFIKPILEKMDGTEELLVKLNREDLLRKQRTFDNGSIPHQIHLGELHAILRRQEDFYPFLKDNREKIEKILTFRIPYYVGPLARGNSRFAWMTRKSEETITPWNFEEVVDKGASAQSFIERMTNFDKNLPNEKVLPKHSLLYEYFTVYNELTKVKYVTEGMRKPAFLSGEQKKAIVDLLFKTNRKVTVKQLKEDYFKKIECFDSVEISGVEDRFNASLGAYHDLLKIIKDKDFLDNEENEDILEDIVLTLTLFEDRGMIEERLKTYAHLFDDKVMKQLKRRRYTGWGRLSRKLINGIRDKQSGKTILDFLKSDGFANRNFMQLIHDDSLTFKEDIQKAQVSGQGHSLHEQIANLAGSPAIKKGILQTVKIVDELVKVMGHKPENIVIEMARENQTTQKGQKNSRERMKRIEEGIKELGSQILKEHPVENTQLQNEKLYLYYLQNGRDMYVDQELDINRLSDYDVDHIVPQSFIKDDSIDNKVLTRSDKNRGKSDNVPSEEVVKKMKNYWRQLLNAKLITQRKFDNLTKAERGGLSELDKAGFIKRQLVETRQITKHVAQILDSRMNTKYDENDKLIREVKVITLKSKLVSDFRKDFQFYKVREINNYHHAHDAYLNAVVGTALIKKYPKLESEFVYGDYKVYDVRKMIAKSEQEIGKATAKYFFYSNIMNFFKTEITLANGEIRKRPLIETNGETGEIVWDKGRDFATVRKVLSMPQVNIVKKTEVQTGGFSKESILPKRNSDKLIARKKDWDPKKYGGFDSPTVAYSVLVVAKVEKGKSKKLKSVKELLGITIMERSSFEKNPIDFLEAKGYKEVKKDLIIKLPKYSLFELENGRKRMLASAGELQKGNELALPSKYVNFLYLASHYEKLKGSPEDNEQKQLFVEQHKHYLDEIIEQISEFSKRVILADANLDKVLSAYNKHRDKPIREQAENIIHLFTLTNLGAPAAFKYFDTTIDRKRYTSTKEVLDATLIHQSITGLYETRIDLSQLGGD

SEQ ID NO: 4 - DNA, 4212 bp, Streptococcus pyogenes
atggataaaaagtattctattggtttagacatcggcactaattccgttggatgggctgtcataaccgatgaatacaaagtaccttcaaagaaatttaaggtgttggggaacacagaccgtcattcgattaaaaagaatcttatcggtgccctcctattcgatagtggcgaaacggcagaggcgactcgcctgaaacgaaccgctcggagaaggtatacacgtcgcaagaaccgaatatgttacttacaagaaatttttagcaatgagatggccaaagttgacgattctttctttcaccgtttggaagagtccttccttgtcgaagaggacaagaaacatgaacggcaccccatctttggaaacatagtagatgaggtggcatatcatgaaaagtacccaacgatttatcacctcagaaaaaagctagttgactcaactgataaagcggacctgaggttaatctacttggctcttgcccatatgataaagttccgtgggcactttctcattgagggtgatctaaatccggacaactcggatgtcgacaaactgttcatccagttagtacaaacctataatcagttgtttgaagagaaccctataaatgcaagtggcgtggatgcgaaggctattcttagcgcccgcctctctaaatcccgacggctagaaaacctgatcgcacaattacccggagagaagaaaaatgggttgttcggtaaccttatagcgctctcactaggcctgacaccaaattttaagtcgaacttcgacttagctgaagatgccaaattgcagcttagtaaggacacgtacgatgacgatctcgacaatctactggcacaaattggagatcagtatgcggacttatttttggctgccaaaaaccttagcgatgcaatcctcctatctgacatactgagagttaatactgagattaccaaggcgccgttatccgcttcaatgatcaaaaggtacgatgaacatcaccaagacttgacacttctcaaggccctagtccgtcagcaactgcctgagaaatataaggaaatattctttgatcagtcgaaaaacgggtacgcaggttatattgacggcggagcgagtcaagaggaattctacaagtttatcaaacccatattagagaagatggatgggacggaagagttgcttgtaaaactcaatcgcgaagatctactgcgaaagcagcggactttcgacaacggtagcattccacatcaaatccacttaggcgaattgcatgctatacttagaaggcaggaggatttttatccgttcctcaaagacaatcgtgaaaagattgagaaaatcctaacctttcgcataccttactatgtgggacccctggcccgagggaactctcggttcgcatggatgacaagaaagtccgaagaaacgattactccatggaattttgaggaagttgtcgataaaggtgcgtcagctcaatcgttcatcgagaggatgaccaactttgacaagaatttaccgaacgaaaaagtattgcctaagcacagtttactttacgagtatttcacagtgtacaatgaactcacgaaagttaagtatgtcactgagggcatgcgtaaacccgcctttctaagcggagaacagaagaaagcaatagtagatctgttattcaagaccaaccgcaaagtgacagttaagcaattgaaagaggactactttaagaaaattgaatgcttcgattctgtcgagatctccggggtagaagatcgatttaatgcgtcacttggtacgtatcatgacctcctaaagataattaaagataaggacttcctggataacgaagagaatgaagatatcttagaagatatagtgttgactcttaccctctttgaagatcgggaaatgattgaggaaagactaaaaacatacgctcacctgttcgacgataaggttatgaaacagttaaagaggcgtcgctatacgggctggggacgattgtcgcggaaacttatcaacgggataagagacaagcaaagtggtaaaactattctcgattttctaaagagcgacggcttcgccaataggaactttatgcagctgatccatgatgactctttaaccttcaaagaggatatacaaaaggcacaggtttccggacaaggggactcattgcacgaacatattgcgaatcttgctggttcgccagccatcaaaaagggcatactccagacagtcaaagtagtggatgagctagttaaggtcatgggacgtcacaaaccggaaaacattgtaatcgagatggcacgcgaaaatcaaacgactcagaaggggcaaaaaaacagtcgagagcggatgaagagaatagaagagggtattaaagaactgggcagccagatcttaaaggagcatcctgtggaaaatacccaattgcagaacgagaaactttacctctattacctacaaaatggaagggacatgtatgttgatcaggaactggacataaaccgtttatctgattacgacgtcgatcacattgtaccccaatcctttttgaaggacgattcaatcgacaataaagtgcttacacgctcggataagaaccgagggaaaagtgacaatgttccaagcgaggaagtcgtaaagaaaatgaagaactattggcggcagctcctaaatgcgaaactgataacgcaaagaaagttcgataacttaactaaagctgagaggggtggcttgtctgaacttgacaaggccggatttattaaacgtcagctcgtggaaacccgccaaatcacaaagcatgttgcacagatactagattcccgaatgaatacgaaatacgacgagaacgataagctgattcgggaagtcaaagtaatcactttaaagtcaaaattggtgtcggacttcagaaaggattttcaattctataaagttagggagataaataactaccaccatgcgcacgacgcttatcttaatgccgtcgtagggaccgcactcattaagaaatacccgaagctagaaagtgagtttgtgtatggtgattacaaagtttatgacgtccgtaagatgatcgcgaaaagcgaacaggagataggcaaggctacagccaaatacttcttttattctaacattatgaatttctttaagacggaaatcactctggcaaacggagagatacgcaaacgacctttaattgaaaccaatggggagacaggtgaaatcgtatgggataagggccgggacttcgcgacggtgagaaaagttttgtccatgccccaagtcaacatagtaaagaaaactgaggtgcagaccggagggttttcaaaggaatcgattcttccaaaaaggaatagtgataagctcatcgctcgtaaaaaggactgggacccgaaaaagtacggtggcttcgatagccctacagttgcctattctgtcctagtagtggcaaaagttgagaagggaaaatccaagaaactgaagtcagtcaaagaattattggggataacgattatggagcgctcgtcttttgaaaagaaccccatcgacttccttgaggcgaaaggttacaaggaagtaaaaaaggatctcataattaaactaccaaagtatagtctgtttgagttagaaaatggccgaaaacggatgttggctagcgccggagagcttcaaaaggggaacgaactcgcactaccgtctaaatacgtgaatttcctgtatttagcgtcccattacgagaagttgaaaggttcacctgaagataacgaacagaagcaactttttgttgagcagcacaaacattatctcgacgaaatcatagagcaaatttcggaattcagtaagagagtcatcctagctgatgccaatctggacaaagtattaagcgcatacaacaagcacagggataaacccatacgtgagcaggcggaaaatattatccatttgtttactcttaccaacctcggcgctccagccgcattcaagtattttgacacaacgatagatcgcaaacgatacacttctaccaaggaggtgctagacgcgacactgattcaccaatccatcacgggattatatgaaactcggatagatttgtcacagcttgggggtgacggatcccccaagaagaagaggaaagtctcgagcgactacaaagaccatgacggtgattataaagatcatgacatcgattacaaggatgacgatgacaaggctgcagga

SEQ ID NO: 5 - protein, 1404 aa, Streptococcus pyogenes
MDKKYSIGLDIGTNSVGWAVITDEYKVPSKKFKVLGNTDRHSIKKNLIGALLFDSGETAEATRLKRTARRRYTRRKNRICYLQEIFSNEMAKVDDSFFHRLEESFLVEEDKKHERHPIFGNIVDEVAYHEKYPTIYHLRKKLVDSTDKADLRLIYLALAHMIKFRGHFLIEGDLNPDNSDVDKLFIQLVQTYNQLFEENPINASGVDAKAILSARLSKSRRLENLIAQLPGEKKNGLFGNLIALSLGLTPNFKSNFDLAEDAKLQLSKDTYDDDLDNLLAQIGDQYADLFLAAKNLSDAILLSDILRVNTEITKAPLSASMIKRYDEHHQDLTLLKALVRQQLPEKYKEIFFDQSKNGYAGYIDGGASQEEFYKFIKPILEKMDGTEELLVKLNREDLLRKQRTFDNGSIPHQIHLGELHAILRRQEDFYPFLKDNREKIEKILTFRIPYYVGPLARGNSRFAWMTRKSEETITPWNFEEVVDKGASAQSFIERMTNFDKNLPNEKVLPKHSLLYEYFTVYNELTKVKYVTEGMRKPAFLSGEQKKAIVDLLFKTNRKVTVKQLKEDYFKKIECFDSVEISGVEDRFNASLGTYHDLLKIIKDKDFLDNEENEDILEDIVLTLTLFEDREMIEERLKTYAHLFDDKVMKQLKRRRYTGWGRLSRKLINGIRDKQSGKTILDFLKSDGFANRNFMQLIHDDSLTFKEDIQKAQVSGQGDSLHEHIANLAGSPAIKKGILQTVKVVDELVKVMGRHKPENIVIEMARENQTTQKGQKNSRERMKRIEEGIKELGSQILKEHPVENTQLQNEKLYLYYLQNGRDMYVDQELDINRLSDYDVDHIVPQSFLKDDSIDNKVLTRSDKNRGKSDNVPSEEVVKKMKNYWRQLLNAKLITQRKFDNLTKAERGGLSELDKAGFIKRQLVETRQITKHVAQILDSRMNTKYDENDKLIREVKVITLKSKLVSDFRKDFQFYKVREINNYHHAHDAYLNAVVGTALIKKYPKLESEFVYGDYKVYDVRKMIAKSEQEIGKATAKYFFYSNIMNFFKTEITLANGEIRKRPLIETNGETGEIVWDKGRDFATVRKVLSMPQVNIVKKTEVQTGGFSKESILPKRNSDKLIARKKDWDPKKYGGFDSPTVAYSVLVVAKVEKGKSKKLKSVKELLGITIMERSSFEKNPIDFLEAKGYKEVKKDLIIKLPKYSLFELENGRKRMLASAGELQKGNELALPSKYVNFLYLASHYEKLKGSPEDNEQKQLFVEQHKHYLDEIIEQISEFSKRVILADANLDKVLSAYNKHRDKPIREQAENIIHLFTLTNLGAPAAFKYFDTTIDRKRYTSTKEVLDATLIHQSITGLYETRIDLSQLGGDGSPKKKRKVSSDYKDHDGDYKDHDIDYKDDDDKAAG

SEQ ID NO: 6 - DNA, 4107 bp, Streptococcus pyogenes
atggataagaaatactcaataggcttagatatcggcacaaatagcgtcggatgggcggtgatcactgatgaatataaggttccgtctaaaaagttcaaggttctgggaaatacagaccgccacagtatcaaaaaaaatcttataggggctcttttatttgacagtggagagacagcggaagcgactcgtctcaaacggacagctcgtagaaggtatacacgtcggaagaatcgtatttgttatctacaggagattttttcaaatgagatggcgaaagtagatgatagtttctttcatcgacttgaagagtcttttttggtggaagaagacaagaagcatgaacgtcatcctatttttggaaatatagtagatgaagttgcttatcatgagaaatatccaactatctatcatctgcgaaaaaaattggtagattctactgataaagcggatttgcgcttaatctatttggccttagcgcatatgattaagtttcgtggtcattttttgattgagggagatttaaatcctgataatagtgatgtggacaaactatttatccagttggtacaaacctacaatcaattatttgaagaaaaccctattaacgcaagtggagtagatgctaaagcgattctttctgcacgattgagtaaatcaagacgattagaaaatctcattgctcagctccccggtgagaagaaaaatggcttatttgggaatctcattgctttgtcattgggtttgacccctaattttaaatcaaattttgatttggcagaagatgctaaattacagctttcaaaagatacttacgatgatgatttagataatttattggcgcaaattggagatcaatatgctgatttgtttttggcagctaagaatttatcagatgctattttactttcagatatcctaagagtaaatactgaaataactaaggctcccctatcagcttcaatgattaaacgctacgatgaacatcatcaagacttgactcttttaaaagctttagttcgacaacaacttccagaaaagtataaagaaatcttttttgatcaatcaaaaaacggatatgcaggttatattgatgggggagctagccaagaagaattttataaatttatcaaaccaattttagaaaaaatggatggtactgaggaattattggtgaaactaaatcgtgaagatttgctgcgcaagcaacggacctttgacaacggctctattccccatcaaattcacttgggtgagctgcatgctattttgagaagacaagaagacttttatccatttttaaaagacaatcgtgagaagattgaaaaaatcttgacttttcgaattccttattatgttggtccattggcgcgtggcaatagtcgttttgcatggatgactcggaagtctgaagaaacaattaccccatggaattttgaagaagttgtcgataaaggtgcttcagctcaatcatttattgaacgcatgacaaactttgataaaaatcttccaaatgaaaaagtactaccaaaacatagtttgctttatgagtattttacggtttataacgaattgacaaaggtcaaatatgttactgaaggaatgcgaaaaccagcatttctttcaggtgaacagaagaaagccattgttgatttactcttcaaaacaaatcgaaaagtaaccgttaagcaattaaaagaagattatttcaaaaaaatagaatgttttgatagtgttgaaatttcaggagttgaagatagatttaatgcttcattaggtacctaccatgatttgctaaaaattattaaagataaagattttttggataatgaagaaaatgaagatatcttagaggatattgttttaacattgaccttatttgaagatagggagatgattgaggaaagacttaaaacatatgctcacctctttgatgataaggtgatgaaacagcttaaacgtcgccgttatactggttggggacgtttgtctcgaaaattgattaatggtattagggataagcaatctggcaaaacaatattagattttttgaaatcagatggttttgccaatcgcaattttatgcagctgatccatgatgatagtttgacatttaaagaagacattcaaaaagcacaagtgtctggacaaggcgatagtttacatgaacatattgcaaatttagctggtagccctgctattaaaaaaggtattttacagactgtaaaagttgttgatgaattggtcaaagtaatggggcggcataagccagaaaatatcgttattgaaatggcacgtgaaaatcagacaactcaaaagggccagaaaaattcgcgagagcgtatgaaacgaatcgaagaaggtatcaaagaattaggaagtcagattcttaaagagcatcctgttgaaaatactcaattgcaaaatgaaaagctctatctctattatctccaaaatggaagagacatgtatgtggaccaagaattagatattaatcgtttaagtgattatgatgtcgatcacattgttccacaaagtttccttaaagacgattcaatagacaataaggtcttaacgcgttctgataaaaatcgtggtaaatcggataacgttccaagtgaagaagtagtcaaaaagatgaaaaactattggagacaacttctaaacgccaagttaatcactcaacgtaagtttgataatttaacgaaagctgaacgtggaggtttgagtgaacttgataaagctggttttatcaaacgccaattggttgaaactcgccaaatcactaagcatgtggcacaaattttggatagtcgcatgaatactaaatacgatgaaaatgataaacttattcgagaggttaaagtgattaccttaaaatctaaattagtttctgacttccgaaaagatttccaattctataaagtacgtgagattaacaattaccatcatgcccatgatgcgtatctaaatgccgtcgttggaactgctttgattaagaaatatccaaaacttgaatcggagtttgtctatggtgattataaagtttatgatgttcgtaaaatgattgctaagtctgagcaagaaataggcaaagcaaccgcaaaatatttcttttactctaatatcatgaacttcttcaaaacagaaattacacttgcaaatggagagattcgcaaacgccctctaatcgaaactaatggggaaactggagaaattgtctgggataaagggcgagattttgccacagtgcgcaaagtattgtccatgccccaagtcaatattgtcaagaaaacagaagtacagacaggcggattctccaaggagtcaattttaccaaaaagaaattcggacaagcttattgctcgtaaaaaagactgggatccaaaaaaatatggtggttttgatagtccaacggtagcttattcagtcctagtggttgctaaggtggaaaaagggaaatcgaagaagttaaaatccgttaaagagttactagggatcacaattatggaaagaagttcctttgaaaaaaatccgattgactttttagaagctaaaggatataaggaagttaaaaaagacttaatcattaaactacctaaatatagtctttttgagttagaaaacggtcgtaaacggatgctggctagtgccggagaattacaaaaaggaaatgagctggctctgccaagcaaatatgtgaattttttatatttagctagtcattatgaaaagttgaagggtagtccagaagataacgaacaaaaacaattgtttgtggagcagcataagcattatttagatgagattattgagcaaatcagtgaattttctaagcgtgttattttagcagatgccaatttagataaagttcttagtgcatataacaaacatagagacaaaccaatacgtgaacaagcagaaaatattattcatttatttacgttgacgaatcttggagctcccgctgcttttaaatattttgatacaacaattgatcgtaaacgatatacgtctacaaaagaagttttagatgccactcttatccatcaatccatcactggtctttatgaaacacgcattgatttgagtcagctaggaggtgactga

SEQ ID NO: 7 - protein, 1368 aa, Streptococcus pyogenes [sequence omitted]

SEQ ID NO: 8 - protein, 1378 aa, Lactobacillus fermentum
MKEYHIGLDIGTSSIGWAVTDSQFKLMRIKGKTAIGVRLFEEGKTAAERRTFRTTRRRLKRRKWRLHYLDEIFAPHLQEVDENFLRRLKQSNIHPEDPTKNQAFIGKLLFPDLLKKNERGYPTLIKMRDELPVEQRAHYPVMNIYKLREAMINEDRQFDLREVYLAVHHIVKYRGHFLNNASVDKFKVGRIDFDKSFNVLNEAYEELQNGEGSFTIEPSKVEKIGQLLLDTKMRKLDRQKAVAKLLEVKVADKEETKRNKQIATAMSKLVLGYKADFATVAMANGNEWKIDLSSETSEDEIEKFREELSDAQNDILTEITSLFSQIMLNEIVPNGMSISESMMDRYWTHERQLAEVKEYLATQPASARKEFDQVYNKYIGQAPKERGFDLEKGLKKILSKKENWKEIDELLKAGDFLPKQRTSANGVIPHQMHQQELDRIIEKQAKYYPWLATENPATGERDRHQAKYELDQLVSFRIPYYVGPLVTPEVQKATSGAKFAWAKRKEDGEITPWNLWDKIDRAESAEAFIKRMTVKDTYLLNEDVLPANSLLYQKYNVLNELNNVRVNGRRLSVGIKQDIYTELFKKKKTVKASDVASLVMAKTRGVNKPSVEGLSDPKKFNSNLATYLDLKSIVGDKVDDNRYQTDLENIIEWRSVFEDGEIFADKLTEVEWLTDEQRSALVKKRYKGWGRLSKKLLTGIVDENGQRIIDLMWNTDQNFKEIVDQPVFKEQIDQLNQKAITNDGMTLRERVESVLDDAYTSPQNKKAIWQVVRVVEDIVKAVGNAPKSISIEFARNEGNKGEITRSRRTQLQKLFEDQAHELVKDTSLTEELEKAPDLSDRYYFYFTQGGKDMYTGDPINFDEISTKYDIDHILPQSFVKDNSLDNRVLTSRKENNKKSDQVPAKLYAAKMKPYWNQLLKQGLITQRKFENLTKDVDQNIKYRSLGFVKRQLVETRQVIKLTANILGSMYQEAGTEIIETRAGLTKQLREEFDLPKVREVNDYHHAVDAYLTTFAGQYLNRRYPKLRSFFVYGEYMKFKHGSDLKLRNFNFFHELMEGDKSQGKVVDQQTGELITTRDEVAKSFDRLLNMKYMLVSKEVHDRSDQLYGATIVTAKESGKLTSPIEIKKNRLVDLYGAYTNGTSAFMTIIKFTGNKPKYKVIGIPTTSAASLKRAGKPGSESYNQELHRIIKSNPKVKKGFEIVVPHVSYGQLIVDGDCKFTLASPTVQHPATQLVLSKKSLETISSGYKILKDKPAIANERLIRVFDEVVGQMNRYFTIFDQRSNRQKVADARDKFLSLPTESKYEGAKKVQVGKTEVITNLLMGLHANATQGDLKVLGLATFGFFQSTTGLSLSEDTMIVYQSPTGLFERRICLKDI

SEQ ID NO: 9 - protein, 1368 aa, Staphylococcus aureus [sequence omitted]

SEQ ID NO: 10 - skipped

SEQ ID NO: 11 - protein, 1053 aa, Staphylococcus aureus
MGKRNYILGLDIGITSVGYGIIDYETRDVIDAGVRLFKEANVENNEGRRSKRGARRLKRRRRHRIQRVKKLLFDYNLLTDHSELSGINPYEARVKGLSQKLSEEEFSAALLHLAKRRGVHNVNEVEEDTGNELSTKEQISRNSKALEEKYVAELQLERLKKDGEVRGSINRFKTSDYVKEAKQLLKVQKAYHQLDQSFIDTYIDLLETRRTYYEGPGEGSPFGWKDIKEWYEMLMGHCTYFPEELRSVKYAYNADLYNALNDLNNLVITRDENEKLEYYEKFQIIENVFKQKKKPTLKQIAKEILVNEEDIKGYRVTSTGKPEFTNLKVYHDIKDITARKEIIENAELLDQIAKILTIYQSSEDIQEELTNLNSELTQEEIEQISNLKGYTGTHNLSLKAINLILDELWHTNDNQIAIFNRLKLVPKKVDLSQQKEIPTTLVDDFILSPVVKRSFIQSIKVINAIIKKYGLPNDIIIELAREKNSKDAQKMINEMQKRNRQTNERIEEIIRTTGKENAKYLIEKIKLHDMQEGKCLYSLEAIPLEDLLNNPFNYEVDHIIPRSVSFDNSFNNKVLVKQEENSKKGNRTPFQYLSSSDSKISYETFKKHILNLAKGKGRISKTKKEYLLEERDINRFSVQKDFINRNLVDTRYATRGLMNLLRSYFRVNNLDVKVKSINGGFTSFLRRKWKFKKERNKGYKHHAEDALIIANADFIFKEWKKLDKAKKVMENQMFEEKQAESMPEIETEQEYKEIFITPHQIKHIKDFKDYKYSHRVDKKPNRKLINDTLYSTRKDDKGNTLIVNNLNGLYDKDNDKLKKLINKSPEKLLMYHHDPQTYQKLKLIMEQYGDEKNPLYKYYEETGNYLTKYSKKDNGPVIKKIKYYGNKLNAHLDITDDYPNSRNKVVKLSLKPYRFDVYLDNGVYKFVTVKNLDVIKKENYYEVNSKCYEEAKKLKKISNQAEFIASFYKNDLIKINGELYRVIGVNNDLLNRIEVNMIDITYREYLENMNDKRPPHIIKTIASKTQSIKKYSTDILGNLYEVKSKKHPQIIKK

SEQ ID NO: 12 - protein, 1409 aa, Streptococcus thermophilus
MLFNKCIIISINLDFSNKEKCMTKPYSIGLDIGTNSVGWAVITDNYKVPSKKMKVLGNTSKKYIKKNLLGVLLFDSGITAEGRRLKRTARRRYTRRRNRILYLQEIFSTEMATLDDAFFQRLDDSFLVPDDKRDSKYPIFGNLVEEKVYHDEFPTIYHLRKYLADSTKKADLRLVYLALAHMIKYRGHFLIEGEFNSKNNDIQKNFQDFLDTYNAIFESDLSLENSKQLEEIVKDKISKLEKKDRILKLFPGEKNSGIFSEFLKLIVGNQADFRKCFNLDEKASLHFSKESYDEDLETLLGYIGDDYSDVFLKAKKLYDAILLSGFLTVTDNETEAPLSSAMIKRYNEHKEDLALLKEYIRNISLKTYNEVFKDDTKNGYAGYIDGKTNQEDFYVYLKNLLAEFEGADYFLEKIDREDFLRKQRTFDNGSIPYQIHLQEMRAILDKQAKFYPFLAKNKERIEKILTFRIPYYVGPLARGNSDFAWSIRKRNEKITPWNFEDVIDKESSAEAFINRMTSFDLYLPEEKVLPKHSLLYETFNVYNELTKVRFIAESMRDYQFLDSKQKKDIVRLYFKDKRKVTDKDIIEYLHAIYGYDGIELKGIEKQFNSSLSTYHDLLNIINDKEFLDDSSNEAIIEEIIHTLTIFEDREMIKQRLSKFENIFDKSVLKKLSRRHYTGWGKLSAKLINGIRDEKSGNTILDYLIDDGISNRNFMQLIHDDALSFKKKIQKAQIIGDEDKGNIKEVVKSLPGSPAIKKGILQSIKIVDELVKVMGGRKPESIVVEMARENQYTNQGKSNSQQRLKRLEKSLKELGSKILKENIPAKLSKIDNNALQNDRLYLYYLQNGKDMYTGDDLDIDRLSNYDIDHIIPQAFLKDNSIDNKVLVSSASNRGKSDDFPSLEVVKKRKTFWYQLLKSKLISQRKFDNLTKAERGGLLPEDKAGFIQRQLVETRQITKHVARLLDEKFNNKKDENNRAVRTVKIITLKSTLVSQFRKDFELYKVREINDFHHAHDAYLNAVIASALLKKYPKLEPEFVYGDYPKYNSFRERKSATEKVYFYSNIMNIFKKSISLADGRVIERPLIEVNEETGESVWNKESDLATVRRVLSYPQVNVVKKVEEQNHGLDRGKPKGLFNANLSSKPKPNSNENLVGAKEYLDPKKYGGYAGISNSFAVLVKGTIEKGAKKKITNVLEFQGISILDRINYRKDKLNFLLEKGYKDIELIIELPKYSLFELSDGSRRMLASILSTNNKRGEIHKGNQIFLSQKFVKLLYHAKRISNTINENHRKYVENHKKEFEELFYYILEFNENYVGAKKNGKLLNSAFQSWQNHSIDELCSSFIGPTGSERKGLFELTSRGSAADFEFLGVKIPRYRDYTPSSLLKDATLIHQSVTGLYETRIDLAKLGEG

SEQ ID NO: 13 - protein, 1402 aa, Lactobacillus crispatus
MKIKNYNLALTPSTSAVGHVEVDDDLNILEPVHHQKAIGVAKFGEGETAEARRLARSARRTTKRRANRINHYFNEIMKPEIDKVDPLMFDRIKQAGLSPLDERKEFRTVIFDRPNIASYYHNQFPTIWHLQKYLMITDEKADIRLIYWALHSLLKHRGHFFNTTPMSQFKPGKLNLKDDMLALDDYNDLEGLSFAVANSPEIEKVIKDRSMHKKEKIAELKKLIVNDVPDKDLAKRNNKIITQIVNAIMGNSFHLNFIFDMDLDKLTSKAWSFKLDDPELDTKFDAISGSMTDNQIGIFETLQKIYSAISLLDILNGSSNVVDAKNALYDKHKRDLNLYFKFLNTLPDEIAKTLKAGYTLYIGNRKKDLLAARKLLKVNVAKNFSQDDFYKLINKELKSIDKQGLQTRFSEKVGELVAQNNFLPVQRSSDNVFIPYQLNAITFNKILENQGKYYDFLVKPNPAKKDRKNAPYELSQLMQFTIPYYVGPLVTPEEQVKSGIPKTSRFAWMVRKDNGAITPWNFYDKVDIEATADKFIKRSIAKDSYLLSELVLPKHSLLYEKYEVFNELSNVSLDGKKLSGGVKQILFNEVFKKTNKVNTSRILKALAKHNIPGSKITGLSNPEEFTSSLQTYNAWKKYFPNQIDNFAYQQDLEKMIEWSTVFEDHKILAKKLDEIEWLDDDQKKFVANTRLRGWGRLSKRLLTGLKDNYGKSIMQRLETTKANFQQIVYKPEFREQIDKISQAAAKNQSLEDILANSYTSPSNRKAIRKTMSVVDEYIKLNHGKEPDKIFLMFQRSEQEKGKQTEARSKQLNRILSQLKADKSANKLFSKQLADEFSNAIKKSKYKLNDKQYFYFQQLGRDALTGEVIDYDELYKYTVLHIIPRSKLTDDSQNNKVLTKYKIVDGSVALKFGNSYSDALGMPIKAFWTELNRLKLIPKGKLLNLTTDFSTLNKYQRDGYIARQLVETQQIVKLLATIMQSRFKHTKIIEVRNSQVANIRYQFDYFRIKNLNEYYRGFDAYLAAVVGTYLYKVYPKARRLFVYGQYLKPKKTNQENQDMHLDSEKKSQGFNFLWNLLYGKQDQIFVNGTDVIAFNRKDLITKMNTVYNYKSQKISLAIDYHNGAMFKATLFPRNDRDTAKTRKLIPKKKDYDTDIYGGYTSNVDGYMLLAEIIKRDGNKQYGFYGVPSRLVSELDTLKKTRYTEYEEKLKEIIKPELGVDLKKIKKIKILKNKVPFNQVIIDKGSKFFITSTSYRWNYRQLILSAESQQTLMDLVVDPDFSNHKARKDARKNADERLIKVYEEILYQVKNYMPMFVELHRCYEKLVDAQKTFKSLKISDKAMVLNQILILLHSNATSPVLEKLGYHTRFTLGKKHNLISENAVLVTQSITGLKENHVSIKQML

SEQ ID NO: 14 - protein, 1385 aa, Pedicoccus damnosus
MTNEKYSIGLDIGTSSIGFAVVNDNNRVIRVKGKNAIGVRLFDEGKAAADRRSFRTTRRSFRTTRRRLSRRRWRLKLLREIFDAYITPVDEAFFIRLKESNLSPKDSKKQYSGDILFNDRSDKDFYEKYPTIYHLRNALMTEHRKFDVREIYLAIHHIMKFRGHFLNATPANNFKVGRLNLEEKFEELNDIYQRVFPDESIEFRTDNLEQIKEVLLDNKRSRADRQRTLVSDIYQSSEDKDIEKRNKAVATEILKASLGNKAKLNVITNVEVDKEAAKEWSITFDSESIDDDLAKIEGQMTDDGHEIIEVLRSLYSGITLSAIVPENHTLSQSMVAKYDLHKDHLKLFKKLINGMTDTKKAKNLRAAYDGYIDGVKGKVLPQEDFYKQVQVNLDDSAEANEIQTYIDQDIFMPKQRTKANGSIPHQLQQQELDQIIENQKAYYPWLAELNPNPDKKRQQLAKYKLDELVTFRVPYYVGPMITAKDQKNQSGAEFAWMIRKEPGNITPWNFDQKVDRMATANQFIKRMTTTDTYLLGEDVLPAQSLLYQKFEVLNELNKIRIDHKPISIEQKQQIFNDLFKQFKNVTIKHLQDYLVSQGQYSKRPLIEGLADEKRFNSSLSTYSDLCGIFGAKLVEENDRQEDLEKIIEWSTIFEDKKIYRAKLNDLTWLTDDQKEKLATKRYQGWGRLSRKLLVGLKNSEHRNIMDILWITNENFMQIQAEPDFAKLVTDANKGMLEKTDSQDVINDLYTSPQNKKAIRQILLVVHDIQNAMHGQAPAKIHVEFARGEERNPRRSVQRQRQVEAAYEKVSNELVSAKVRQEFKEAINNKRDFKDRLFLYFMQGGIDIYTGKQLNIDQLSSYQIDHILPQAFVKDDSLTNRVLTNENQVKADSVPIDIFGKKMLSVWGRMKDQGLISKGKYRNLTMNPENISAHTENGFINRQLVETRQVIKLAVNILADEYGDSTQIISVKADLSHQMREDFELLKNRDVNDYHHAFDAYLAAFIGNYLLKRYPKLESYFVYGDFKKFTQKETKMRRFNFIYDLKHCDQVVNKETGEILWTKDEDIKYIRHLFAYKKILVSHEVREKRGALYNQTIYKAKDDKGSGQESKKLIRIKDDKETKIYGGYSGKSLAYMTIVQITKKNKVSYRVIGIPTLALARLNKLENDSTENNGELYKIIKPQFTHYKVDKKNGEIIETTDDFKIVVSKVRFQQLIDDAGQFFMLASDTYKNNAQQLVISNNALKAINNTNITDCPRDDLERLDNLRLDSAFDEIVKKMDKYFSAYDANNFREKIRNSNLIFYQLPVEDQWENNKITELGKRTVLTRILQGLHANATTTDMSIFKIKTPFGQLRQRSGISLSENAQLIYQSPTGLFERRVQLNKIK

SEQ ID NO: 15 - protein, 1286 aa, Enterococcus cecorum
RRKQRIQILQELLGEEVLKTDPGFFHRMKESRYVVEDKRTLDGKQVELPYALFVDKDYTDKEYYKQFPTINHLIVYLMTTSDTPDIRLVYLALHYYMKNRGNFLHSGDINNVKDINDILEQLDNVLETFLDGWNLKLKSYVEDIKNIYNRDLGRGERKKAFVNTLGAKTKAEKAFCSLISGGSTNLAELFDDSSLKEIETPKIEFASSSLEDKIDGIQEALEDRFAVIEAAKRLYDWKTLTDILGDSSSLAEARVNSYQMHHEQLLELKSLVKEYLDRKVFQEVFVSLNVANNYPAYIGHTKINGKKKELEVKRTKRNDFYSYVKKQVIEPIKKKVSDEAVLTKLSEIESLIEVDKYLPLQVNSDNGVIPYQVKLNELTRIFDNLENRIPVLRENRDKIIKTFKFRIPYYVGSLNGVVKNGKCTNWMVRKEEGKIYPWNFEDKVDLEASAEQFIRRMTNKCTYLVNEDVLPKYSLLYSKYLVLSELNNLRIDGRPLDVKIKQDIYENVFKKNRKVTLKKIKKYLLKEGIITDDDELSGLADDVKSSLTAYRDFKEKLGHLDLSEAQMENIILNITLFGDDKKLLKKRLAALYPFIDDKSLNRIATLNYRDWGRLSERFLSGITSVDQETGELRTIIQCMYETQANLMQLLAEPYHFVEAIEKENPKVDLESISYRIVNDLYVSPAVKRQIWQTLLVIKDIKQVMKHDPERIFIEMAREKQESKKTKSRKQVLSEVYKKAKEYEHLFEKLNSLTEEQLRSKKIYLYFTQLGKCMYSGEPIDFENLVSANSNYDIDHIYPQSKTIDDSFNNIVLVKKSLNAYKSNHYPIDKNIRDNEKVKTLWNTLVSKGLITKEKYERLIRSTPFSDEELAGFIARQLVETRQSTKAVAEILSNWFPESEIVYSKAKNVSNFRQDFEILKVRELNDCHHAHDAYLNIVVGNAYHTKFTNSPYRFIKNKANQEYNLRKLLQKVNKIESNGVVAWVGQSENNPGTIATVKKVIRRNTVLISRMVKEVDGQLFDLTLMKKGKGQVPIKSSDERLTDISKYGGYNKATGAYFTFVKSKKRGKVVRSFEYVPLHLSKQFENNNELLKEYIEKDRGLTDVEILIPKVLINSLFRYNGSLVRITGRGDTRLLLVHEQPLYVSNSFVQQLKSVSSYKLKKSENDNAKLTKTATEKLSNIDELYDGLLRKLDLPIYSYWFSSIKEYLVESRTKYIKLSIEEKALVIFEILHLFQSDAQVPNLKILGLSTKPSRIRIQKNLKDTDKMSIIHQSPSGIFEHEIELTSL

SEQ ID NO: 16 - protein, 1312 aa, Anaerostipes hadrus
MQNGFLGITVSSEQVGWAVTNPKYELERASRKDLWGVRLFDKAETAEDRRMFRTNRRLNQRKKNRIHYLRDIFHEEVNQKDPNFFQQLDESNFCEDDRTVEFNFDTNLYKNQFPTVYHLRKYLMETKDKPDIRLVYLAFSKFMKNRGHFLYKGNLGEVMDFENSMKGFCESLEKFNIDFPTLSDEQVKEVRDILCDHKIAKTVKKKNIITITKVKSKTAKAWIGLFCGCSVPVKVLFQDIDEEIVTDPEKISFEDASYDDYIANIEKGVGIYYEAIVSAKMLFDWSILNEILGDHQLLSDAMIAEYNKHHDDLKRLQKIIKGTGSRELYQDIFINDVSGNYVCYVGHAKTMSSADQKQFYTFLKNRLKNVNGISSEDAEWIDTEIKNGTLLPKQTKRDNSVIPHQLQLREFELILDNMQEMYPFLKENREKLLKIFNFVIPYYVGPLKGVVRKGESTNWMVPKKDGVIHPWNFDEMVDKEASAECFISRMTGNCSYLFNEKVLPKNSLLYETFEVLNELNPLKINGEPISVELKQRIYEQLFLTGKKVTKKSLTKYLIKNGYDKDIELSGIDNEFHSNLKSHIDFEDYDNLSDEEVEQIILRITVFEDKQLLKDYLNREFVKLSEDERKQICSLSYKGWGNLSEMLLNGITVTDSNGVEVSVMDMLWNTNLNLMQILSKKYGYKAEIEHYNKEHEKTIYNREDLMDYLNIPPAQRRKVNQLITIVKSLKKTYGVPNKIFFKISREHQDDPKRTSSRKEQLKYLYKSLKSEDEKHLMKELDELNDHELSNDKVYLYFLQKGRCIYSGKKLNLSRLRKSNYQNDIDYIYPLSAVNDRSMNNKVLTGIQENRADKYTYFPVDSEIQKKMKGFWMELVLQGFMTKEKYFRLSRENDFSKSELVSFIEREISDNQQSGRMIASVLQYYFPESKIVFVKEKLISSFKRDFHLISSYGHNHLQAAKDAYITIVVGNVYHTKFTMDPAIYFKNHKRKDYDLNRLFLENISRDGQIAWESGPYGSIQTVRKEYAQNHIAVTKRVVEVKGGLFKQMPLKKGHGEYPLKTNDPRFGNIAQYGGYTNVTGSYFVLVESMEKGKKRISLEYVPVYLHERLEDDPGHKLLKEYLVDHRKLNHPKILLAKVRKNSLLKIDGFYYRLNGRSGNALILTNAVELIMDDWQTKTANKISGYMKRRAIDKKARVYQNEFHIQELEQLYDFYLDKLKNGVYKNRKNNQAELIHNEKEQFMELKTEDQCVLLTEIKKLFVCSPMQADLTLIGGSKHTGMIAMSSNVTKADFAVIAEDPLGLRNKVIYSHKGEK

SEQ ID NO: 17 - protein, 1344 aa, Kandleria vitulina
MSQNNNKIYNIGLDIGDASVGWAVVDEHYNLLKRHGKHMWGSRLFTQANTAVERRSSRSTRRRYNKRRERIRLLREIMEDMVLDVDPTFFIRLANVSFLDQEDKKDYLKENYHSNYNLFIDKDFNDKTYYDKYPTIYHLRKHLCESKEKEDPRLIYLALHHIVKYRGNFLYEGQKFSMDVSNIEDKMIDVLRQFNEINLFEYVEDRKKIDEVLNVLKEPLSKKHKAEKAFALFDTTKDNKAAYKELCAALAGNKFNVTKMLKEAELHDEDEKDISFKFSDATFDDAFVEKQPLLGDCVEFIDLLHDIYSWVELQNILGSAHTSEPSISAAMIQRYEDHKNDLKLLKDVIRKYLPKKYFEVFRDEKSKKNNYCNYINHPSKTPVDEFYKYIKKLIEKIDDPDVKTILNKIELESFMLKQNSRTNGAVPYQMQLDELNKILENQSVYYSDLKDNEDKIRSILTFRIPYYFGPLNITKDRQFDWIIKKEGKENERILPWNANEIVDVDKTADEFIKRMRNFCTYFPDEPVMAKNSLTVSKYEVLNEINKLRINDHLIKRDMKDKMLHTLFMDHKSISANAMKKWLVKNQYFSNTDDIKIEGFQKENACSTSLTPWIDFTKIFGKINESNYDFIEKIIYDVTVFEDKKILRRRLKKEYDLDEEKIKKILKLKYSGWSRLSKKLLSGIKTKYKDSTRTPETVLEVMERTNMNLMQVINDEKLGFKKTIDDANSTSVSGKFSYAEVQELAGSPAIKRGIWQALLIVDEIKKIMKHEPAHVYIEFARNEDEKERKDSFVNQMLKLYKDYDFEDETEKEANKHLKGEDAKSKIRSERLKLYYTQMGKCMYTGKSLDIDRLDTYQVDHIVPQSLLKDDSIDNKVLVLSSENQRKLDDLVIPSSIRNKMYGFWEKLFNNKIISPKKFYSLIKTEFNEKDQERFINRQIVETRQITKHVAQIIDNHYENTKVVTVRADLSHQFRERYHIYKNRDINDFHHAHDAYIATILGTYIGHRFESLDAKYIYGEYKRIFRNQKNKGKEMKKNNDGFILNSMRNIYADKDTGEIVWDPNYIDRIKKCFYYKDCFVTKKLEENNGTFFNVTVLPNDTNSDKDNTLATVPVNKYRSNVNKYGGFSGVNSFIVAIKGKKKKGKKVIEVNKLTGIPLMYKNADEEIKINYLKQAEDLEEVQIGKEILKNQLIEKDGGLYYIVAPTEIINAKQLILNESQTKLVCEIYKAMKYKNYDNLDSEKIIDLYRLLINKMELYYPEYRKQLVKKFEDRYEQLKVISIEEKCNIIKQILATLHCNSSIGKIMYSDFKISTTIGRLNGRTISLDDISFIAESPTGMYSKKYKL

SEQ ID NO: 18 - protein, 1288 aa, Enterococcus faecalis
MRLFEEGHTAEDRRLKRTARRRISRRRNRLRYLQAFFEEAMTDLDENFFARLQESFLVPEDKKWHRHPIFAKLEDEVAYHETYPTIYHLRKKLADSSEQADLRLIYLALAHIVKYRGHFLIEGKLSTENTSVKDQFQQFMVIYNQTFVNGESRLVSAPLPESVLIEEELTEKASRTKKSEKVLQQFPQEKANGLFGQFLKLMVGNKADFKKVFGLEEEAKITYASESYEEDLEGILAKVGDEYSDVFLAAKNVYDAVELSTILADSDKKSHAKLSSSMIVRFTEHQEDLKKFKRFIRENCPDEYDNLFKNEQKDGYAGYIAHAGKVSQLKFYQYVKKIIQDIAGAEYFLEKIAQENFLRKQRTFDNGVIPHQIHLAELQAIIHRQAAYYPFLKENQEKIEQLVTFRIPYYVGPLSKGDASTFAWLKRQSEEPIRPWNLQETVDLDQSATAFIERMTNFDTYLPSEKVLPKHSLLYEKFMVFNELTKISYTDDRGIKANFSGKEKEKIFDYLFKTRRKVKKKDIIQFYRNEYNTEIVTLSGLEEDQFNASFSTYQDLLKCGLTRAELDHPDNAEKLEDIIKILTIFEDRQRIRTQLSTFKGQFSAEVLKKLERKHYTGWGRLSKKLINGIYDKESGKTILDYLVKDDGVSKHYNRNFMQLINDSQLSFKNAIQKAQSSEHEETLSETVNELAGSPAIKKGIYQSLKIVDELVAIMGYAPKRIVVEMARENQTTSTGKRRSIQRLKIVEKAMAEIGSNLLKEQPTTNEQLRDTRLFLYYMQNGKDMYTGDELSLHRLSHYDIDHIIPQSFMKDDSLDNLVLVGSTENRGKSDDVPSKEVVKDMKAYWEKLYAAGLISQRKFQRLTKGEQGGLTLEDKAHFIQRQLVETRQITKNVAGILDQRYNAKSKEKKVQIITLKASLTSQFRSIFGLYKVREVNDYHHGQDAYLNCVVATTLLKVYPNLAPEFVYGEYPKFQTFKENKATAKAIIYTNLLRFFTEDEPRFTKDGEILWSNSYLKTIKKELNYHQMNIVKKVEVQKGGFSKESIKPKGPSNKLIPVKNGLDPQKYGGFDSPVVAYTVLFTHEKGKKPLIKQEILGITIMEKTRFEQNPILFLEEKGFLRPRVLMKLPKYTLYEFPEGRRRLLASAKEAQKGNQMVLPEHLLTLLYHAKQCLLPNQSESLAYVEQHQPEFQEILERVVDFAEVHTLAKSKVQQIVKLFEANQTADVKEIAASFIQLMQFNAMGAPSTFKFFQKDIERARYTSIKEIFDATIIYQSPTGLYETRRKVVD

SEQ ID NO: 19 - protein, 1375 aa, S. canis
MEKKYSIGLDIGTNSVGWAVITDDYKVPSKKFKVLGNTNRKSIKKNLMGALLFDSGETAEATRLKRTARRRYTRRKNRIRYLQEIFANEMAKLDDSFFQRLEESFLVEEDKKNERHPIFGNLADEVAYHRNYPTIYHLRKKLADSPEKADLRLIYLALAHIIKFRGHFLIEGKLNAENSDVAKLFYQLIQTYNQLFEESPLDEIEVDAKGILSARLSKSKRLEKLIAVFPNEKKNGLFGNIIALALGLTPNFKSNFDLTEDAKLQLSKDTYDDDLDELLGQIGDQYADLFSAAKNLSDAILLSDILRSNSEVTKAPLSASMVKRYDEHHQDLALLKTLVRQQFPEKYAEIFKDDTKNGYAGYVGIGIKHRKRTTKLATQEEFYKFIKPILEKMDGAEELLAKLNRDDLLRKQRTFDNGSIPHQIHLKELHAILRRQEEFYPFLKENREKIEKILTFRIPYYVGPLARGNSRFAWLTRKSEEAITPWNFEEVVDKGASAQSFIERMTNFDEQLPNKKVLPKHSLLYEYFTVYNELTKVKYVTERMRKPEFLSGEQKKAIVDLLFKTNRKVTVKQLKEDYFKKIECFDSVEIIGVEDRFNASLGTYHDLLKIIKDKDFLDNEENEDILEDIVLTLTLFEDREMIEERLKTYAHLFDDKVMKQLKRRHYTGWGRLSRKMINGIRDKQSGKTILDFLKSDGFSNRNFMQLIHDDSLTFKEEIEKAQVSGQGDSLHEQIADLAGSPAIKKGILQTVKIVDELVKVMGHKPENIVIEMARENQTTTKGLQQSRERKKRIEEGIKELESQILKENPVENTQLQNEKLYLYYLQNGRDMYVDQELDINRLSDYDVDHIVPQSFIKDDSIDNKVLTRSVENRGKSDNVPSEEVVKKMKNYWRQLLNAKLITQRKFDNLTKAERGGLSEADKAGFIKRQLVETRQITKHVARILDSRMNTKRDKNDKPIREVKVITLKSKLVSDFRKDFQLYKVRDINNYHHAHDAYLNAVVGTALIKKYPKLESEFVYGDYKVYDVRKMIAKSEQEIGKATAKRFFYSNIMNFFKTEVKLANGEIRKRPLIETNGETGEVVWNKEKDFATVRKVLAMPQVNIVKKTEVQTGGFSKESILSKRESAKLIPRKKGWDTRKYGGFGSPTVAYSILVVAKVEKGKAKKLKSVKVLVGITIMEKGSYEKDPIGFLEAKGYKDIKKELIFKLPKYSLFELENGRRRMLASATELQKANELVLPQHLVRLLYYTQNISATTGSNNLGYIEQHREEFKEIFEKIIDFSEKYILKNKVNSNLKSSFDEQFAVSDSILLSNSFVSLLKYTSFGASGGFTFLDLDVKQGRLRYQTVTEVLDATLIYQSITGLYETRTDLSQLGGD

SEQ ID NO: 20 - protein, 1368 aa, Streptococcus pyogenes
  misc_feature (10)..(10): Xaa can be any naturally occurring amino acid
  misc_feature (840)..(840): Xaa can be any naturally occurring amino acid
MDKKYSIGLXIGTNSVGWAVITDEYKVPSKKFKVLGNTDRHSIKKNLIGALLFDSGETAEATRLKRTARRRYTRRKNRICYLQEIFSNEMAKVDDSFFHRLEESFLVEEDKKHERHPIFGNIVDEVAYHEKYPTIYHLRKKLVDSTDKADLRLIYLALAHMIKFRGHFLIEGDLNPDNSDVDKLFIQLVQTYNQLFEENPINASGVDAKAILSARLSKSRRLENLIAQLPGEKKNGLFGNLIALSLGLTPNFKSNFDLAEDAKLQLSKDTYDDDLDNLLAQIGDQYADLFLAAKNLSDAILLSDILRVNTEITKAPLSASMIKRYDEHHQDLTLLKALVRQQLPEKYKEIFFDQSKNGYAGYIDGGASQEEFYKFIKPILEKMDGTEELLVKLNREDLLRKQRTFDNGSIPHQIHLGELHAILRRQEDFYPFLKDNREKIEKILTFRIPYYVGPLARGNSRFAWMTRKSEETITPWNFEEVVDKGASAQSFIERMTNFDKNLPNEKVLPKHSLLYEYFTVYNELTKVKYVTEGMRKPAFLSGEQKKAIVDLLFKTNRKVTVKQLKEDYFKKIECFDSVEISGVEDRFNASLGTYHDLLKIIKDKDFLDNEENEDILEDIVLTLTLFEDREMIEERLKTYAHLFDDKVMKQLKRRRYTGWGRLSRKLINGIRDKQSGKTILDFLKSDGFANRNFMQLIHDDSLTFKEDIQKAQVSGQGDSLHEHIANLAGSPAIKKGILQTVKVVDELVKVMGRHKPENIVIEMARENQTTQKGQKNSRERMKRIEEGIKELGSQILKEHPVENTQLQNEKLYLYYLQNGRDMYVDQELDINRLSDYDVDXIVPQSFLKDDSIDNKVLTRSDKNRGKSDNVPSEEVVKKMKNYWRQLLNAKLITQRKFDNLTKAERGGLSELDKAGFIKRQLVETRQITKHVAQILDSRMNTKYDENDKLIREVKVITLKSKLVSDFRKDFQFYKVREINNYHHAHDAYLNAVVGTALIKKYPKLESEFVYGDYKVYDVRKMIAKSEQEIGKATAKYFFYSNIMNFFKTEITLANGEIRKRPLIETNGETGEIVWDKGRDFATVRKVLSMPQVNIVKKTEVQTGGFSKESILPKRNSDKLIARKKDWDPKKYGGFDSPTVAYSVLVVAKVEKGKSKKLKSVKELLGITIMERSSFEKNPIDFLEAKGYKEVKKDLIIKLPKYSLFELENGRKRMLASAGELQKGNELALPSKYVNFLYLASHYEKLKGSPEDNEQKQLFVEQHKHYLDEIIEQISEFSKRVILADANLDKVLSAYNKHRDKPIREQAENIIHLFTLTNLGAPAAFKYFDTTIDRKRYTSTKEVLDATLIHQSITGLYETRIDLSQLGGD

SEQ ID NO: 21 - protein, 1227 aa, Lachnospiraceae bacterium
MSKLEKFTNCYSLSKTLRFKAIPVGKTQENIDNKRLLVEDEKRAEDYKGVKKLLDRYYLSFINDVLHSIKLKNLNNYISLFRKKTRTEKENKELENLEINLRKEIAKAFKGNEGYKSLFKKDIIETILPEFLDDKDEIALVNSFNGFTTAFTGFFDNRENMFSEEAKSTSIAFRCINENLTRYISNMDIFEKVDAIFDKHEVQEIKEKILNSDYDVEDFFEGEFFNFVLTQEGIDVYNAIIGGFVTESGEKIKGLNEYINLYNQKTKQKLPKFKPLYKQVLSDRESLSFYGEGYTSDEEVLEVFRNTLNKNSEIFSSIKKLEKLFKNFDEYSSAGIFVKNGPAISTISKDIFGEWNVIRDKWNAEYDDIHLKKKAVVTEKYEDDRRKSFKKIGSFSLEQLQEYADADLSVVEKLKEIIIQKVDEIYKVYGSSEKLFDADFVLEKSLKKNDAVVAIMKDLLDSVKSFENYIKAFFGEGKETNRDESFYGDFVLAYDILLKVDHIYDAIRNYVTQKPYSKDKFKLYFQNPQFMGGWDKDKETDYRATILRYGSKYYLAIMDKKYAKCLQKIDKDDVNGNYEKINYKLLPGPNKMLPKVFFSKKWMAYYNPSEDIQKIYKNGTFKKGDMFNLNDCHKLIDFFKDSISRYPKWSNAYDFNFSETEKYKDIAGFYREVEEQGYKVSFESASKKEVDKLVEEGKLYMFQIYNKDFSDKSHGTPNLHTMYFKLLFDENNHGQIRLSGGAELFMRRASLKKEELVVHPANSPIANKNPDNPKKTTTLSYDVYKDKRFSEDQYELHIPIAINKCPKNIFKINTEVRVLLKHDDNPYVIGIARGERNLLYIVVVDGKGNIVEQYSLNEIINNFNGIRIKTDYHSLLDKKEKERFEARQNWTSIENIKELKAGYISQVVHKICELVEKYDAVIALEDLNSGFKNSRVKVEKQVYQKFEKMLIDKLNYMVDKKSNPCATGGALKGYQITNKFESFKSMSTQNGFIFYIPAWLTSKIDPSTGFVNLLKTKYTSIADSKKFISSFDRIMYVPEEDLFEFALDYKNFSRTDADYIKKWKLYSYGNRIRIFRNPKKNNVFDWEEVCLTSAYKELFNKYGINYQQGDIRALLCEQSDKAFYSSFMALMSLMLQMRNSITGRTDVDFLISPVKNSDGIFYDSRNYEAQENAILPKNADANGAYNIARKVLWAIGQFKKAEDEKLDKVKIAISNKEWLEYAQTSVK

SEQ ID NO: 22 - protein, 1368 aa, Streptococcus pyogenes
  misc_feature (10)..(10): Xaa can be any naturally occurring amino acid
MDKKYSIGLXIGTNSVGWAVITDEYKVPSKKFKVLGNTDRHSIKKNLIGALLFDSGETAEATRLKRTARRRYTRRKNRICYLQEIFSNEMAKVDDSFFHRLEESFLVEEDKKHERHPIFGNIVDEVAYHEKYPTIYHLRKKLVDSTDKADLRLIYLALAHMIKFRGHFLIEGDLNPDNSDVDKLFIQLVQTYNQLFEENPINASGVDAKAILSARLSKSRRLENLIAQLPGEKKNGLFGNLIALSLGLTPNFKSNFDLAEDAKLQLSKDTYDDDLDNLLAQIGDQYADLFLAAKNLSDAILLSDILRVNTEITKAPLSASMIKRYDEHHQDLTLLKALVRQQLPEKYKEIFFDQSKNGYAGYIDGGASQEEFYKFIKPILEKMDGTEELLVKLNREDLLRKQRTFDNGSIPHQIHLGELHAILRRQEDFYPFLKDNREKIEKILTFRIPYYVGPLARGNSRFAWMTRKSEETITPWNFEEVVDKGASAQSFIERMTNFDKNLPNEKVLPKHSLLYEYFTVYNELTKVKYVTEGMRKPAFLSGEQKKAIVDLLFKTNRKVTVKQLKEDYFKKIECFDSVEISGVEDRFNASLGTYHDLLKIIKDKDFLDNEENEDILEDIVLTLTLFEDREMIEERLKTYAHLFDDKVMKQLKRRRYTGWGRLSRKLINGIRDKQSGKTILDFLKSDGFANRNFMQLIHDDSLTFKEDIQKAQVSGQGDSLHEHIANLAGSPAIKKGILQTVKVVDELVKVMGRHKPENIVIEMARENQTTQKGQKNSRERMKRIEEGIKELGSQILKEHPVENTQLQNEKLYLYYLQNGRDMYVDQELDINRLSDYDVDHIVPQSFLKDDSIDNKVLTRSDKNRGKSDNVPSEEVVKKMKNYWRQLLNAKLITQRKFDNLTKAERGGLSELDKAGFIKRQLVETRQITKHVAQILDSRMNTKYDENDKLIREVKVITLKSKLVSDFRKDFQFYKVREINNYHHAHDAYLNAVVGTALIKKYPKLESEFVYGDYKVYDVRKMIAKSEQEIGKATAKYFFYSNIMNFFKTEITLANGEIRKRPLIETNGETGEIVWDKGRDFATVRKVLSMPQVNIVKKTEVQTGGFSKESILPKRNSDKLIARKKDWDPKKYGGFDSPTVAYSVLVVAKVEKGKSKKLKSVKELLGITIMERSSFEKNPIDFLEAKGYKEVKKDLIIKLPKYSLFELENGRKRMLASAGELQKGNELALPSKYVNFLYLASHYEKLKGSPEDNEQKQLFVEQHKHYLDEIIEQISEFSKRVILADANLDKVLSAYNKHRDKPIREQAENIIHLFTLTNLGAPAAFKYFDTTIDRKRYTSTKEVLDATLIHQSITGLYETRIDLSQLGGD

SEQ ID NO: 23 - protein, 1368 aa, Streptococcus pyogenes
  misc_feature (762)..(762): Xaa can be any naturally occurring amino acid
MDKKYSIGLDIGTNSVGWAVITDEYKVPSKKFKVLGNTDRHSIKKNLIGALLFDSGETAEATRLKRTARRRYTRRKNRICYLQEIFSNEMAKVDDSFFHRLEESFLVEEDKKHERHPIFGNIVDEVAYHEKYPTIYHLRKKLVDSTDKADLRLIYLALAHMIKFRGHFLIEGDLNPDNSDVDKLFIQLVQTYNQLFEENPINASGVDAKAILSARLSKSRRLENLIAQLPGEKKNGLFGNLIALSLGLTPNFKSNFDLAEDAKLQLSKDTYDDDLDNLLAQIGDQYADLFLAAKNLSDAILLSDILRVNTEITKAPLSASMIKRYDEHHQDLTLLKALVRQQLPEKYKEIFFDQSKNGYAGYIDGGASQEEFYKFIKPILEKMDGTEELLVKLNREDLLRKQRTFDNGSIPHQIHLGELHAILRRQEDFYPFLKDNREKIEKILTFRIPYYVGPLARGNSRFAWMTRKSEETITPWNFEEVVDKGASAQSFIERMTNFDKNLPNEKVLPKHSLLYEYFTVYNELTKVKYVTEGMRKPAFLSGEQKKAIVDLLFKTNRKVTVKQLKEDYFKKIECFDSVEISGVEDRFNASLGTYHDLLKIIKDKDFLDNEENEDILEDIVLTLTLFEDREMIEERLKTYAHLFDDKVMKQLKRRRYTGWGRLSRKLINGIRDKQSGKTILDFLKSDGFANRNFMQLIHDDSLTFKEDIQKAQVSGQGDSLHEHIANLAGSPAIKKGILQTVKVVDELVKVMGRHKPENIVIXMARENQTTQKGQKNSRERMKRIEEGIKELGSQILKEHPVENTQLQNEKLYLYYLQNGRDMYVDQELDINRLSDYDVDHIVPQSFLKDDSIDNKVLTRSDKNRGKSDNVPSEEVVKKMKNYWRQLLNAKLITQRKFDNLTKAERGGLSELDKAGFIKRQLVETRQITKHVAQILDSRMNTKYDENDKLIREVKVITLKSKLVSDFRKDFQFYKVREINNYHHAHDAYLNAVVGTALIKKYPKLESEFVYGDYKVYDVRKMIAKSEQEIGKATAKYFFYSNIMNFFKTEITLANGEIRKRPLIETNGETGEIVWDKGRDFATVRKVLSMPQVNIVKKTEVQTGGFSKESILPKRNSDKLIARKKDWDPKKYGGFDSPTVAYSVLVVAKVEKGKSKKLKSVKELLGITIMERSSFEKNPIDFLEAKGYKEVKKDLIIKLPKYSLFELENGRKRMLASAGELQKGNELALPSKYVNFLYLASHYEKLKGSPEDNEQKQLFVEQHKHYLDEIIEQISEFSKRVILADANLDKVLSAYNKHRDKPIREQAENIIHLFTLTNLGAPAAFKYFDTTIDRKRYTSTKEVLDATLIHQSITGLYETRIDLSQLGGD

SEQ ID NO: 24 - protein, 1368 aa, Streptococcus pyogenes
  misc_feature (983)..(983): Xaa can be any naturally occurring amino acid
MDKKYSIGLDIGTNSVGWAVITDEYKVPSKKFKVLGNTDRHSIKKNLIGALLFDSGETAEATRLKRTARRRYTRRKNRICYLQEIFSNEMAKVDDSFFHRLEESFLVEEDKKHERHPIFGNIVDEVAYHEKYPTIYHLRKKLVDSTDKADLRLIYLALAHMIKFRGHFLIEGDLNPDNSDVDKLFIQLVQTYNQLFEENPINASGVDAKAILSARLSKSRRLENLIAQLPGEKKNGLFGNLIALSLGLTPNFKSNFDLAEDAKLQLSKDTYDDDLDNLLAQIGDQYADLFLAAKNLSDAILLSDILRVNTEITKAPLSASMIKRYDEHHQDLTLLKALVRQQLPEKYKEIFFDQSKNGYAGYIDGGASQEEFYKFIKPILEKMDGTEELLVKLNREDLLRKQRTFDNGSIPHQIHLGELHAILRRQEDFYPFLKDNREKIEKILTFRIPYYVGPLARGNSRFAWMTRKSEETITPWNFEEVVDKGASAQSFIERMTNFDKNLPNEKVLPKHSLLYEYFTVYNELTKVKYVTEGMRKPAFLSGEQKKAIVDLLFKTNRKVTVKQLKEDYFKKIECFDSVEISGVEDRFNASLGTYHDLLKIIKDKDFLDNEENEDILEDIVLTLTLFEDREMIEERLKTYAHLFDDKVMKQLKRRRYTGWGRLSRKLINGIRDKQSGKTILDFLKSDGFANRNFMQLIHDDSLTFKEDIQKAQVSGQGDSLHEHIANLAGSPAIKKGILQTVKVVDELVKVMGRHKPENIVIEMARENQTTQKGQKNSRERMKRIEEGIKELGSQILKEHPVENTQLQNEKLYLYYLQNGRDMYVDQELDINRLSDYDVDHIVPQSFLKDDSIDNKVLTRSDKNRGKSDNVPSEEVVKKMKNYWRQLLNAKLITQRKFDNLTKAERGGLSELDKAGFIKRQLVETRQITKHVAQILDSRMNTKYDENDKLIREVKVITLKSKLVSDFRKDFQFYKVREINNYHXAHDAYLNAVVGTALIKKYPKLESEFVYGDYKVYDVRKMIAKSEQEIGKATAKYFFYSNIMNFFKTEITLANGEIRKRPLIETNGETGEIVWDKGRDFATVRKVLSMPQVNIVKKTEVQTGGFSKESILPKRNSDKLIARKKDWDPKKYGGFDSPTVAYSVLVVAKVEKGKSKKLKSVKELLGITIMERSSFEKNPIDFLEAKGYKEVKKDLIIKLPKYSLFELENGRKRMLASAGELQKGNELALPSKYVNFLYLASHYEKLKGSPEDNEQKQLFVEQHKHYLDEIIEQISEFSKRVILADANLDKVLSAYNKHRDKPIREQAENIIHLFTLTNLGAPAAFKYFDTTIDRKRYTSTKEVLDATLIHQSITGLYETRIDLSQLGGD

SEQ ID NO: 25 - protein, 1368 aa, Streptococcus pyogenes
  misc_feature (986)..(986): Xaa can be any naturally occurring amino acid
MDKKYSIGLDIGTNSVGWAVITDEYKVPSKKFKVLGNTDRHSIKKNLIGALLFDSGETAEATRLKRTARRRYTRRKNRICYLQEIFSNEMAKVDDSFFHRLEESFLVEEDKKHERHPIFGNIVDEVAYHEKYPTIYHLRKKLVDSTDKADLRLIYLALAHMIKFRGHFLIEGDLNPDNSDVDKLFIQLVQTYNQLFEENPINASGVDAKAILSARLSKSRRLENLIAQLPGEKKNGLFGNLIALSLGLTPNFKSNFDLAEDAKLQLSKDTYDDDLDNLLAQIGDQYADLFLAAKNLSDAILLSDILRVNTEITKAPLSASMIKRYDEHHQDLTLLKALVRQQLPEKYKEIFFDQSKNGYAGYIDGGASQEEFYKFIKPILEKMDGTEELLVKLNREDLLRKQRTFDNGSIPHQIHLGELHAILRRQEDFYPFLKDNREKIEKILTFRIPYYVGPLARGNSRFAWMTRKSEETITPWNFEEVVDKGASAQSFIERMTNFDKNLPNEKVLPKHSLLYEYFTVYNELTKVKYVTEGMRKPAFLSGEQKKAIVDLLFKTNRKVTVKQLKEDYFKKIECFDSVEISGVEDRFNASLGTYHDLLKIIKDKDFLDNEENEDILEDIVLTLTLFEDREMIEERLKTYAHLFDDKVMKQLKRRRYTGWGRLSRKLINGIRDKQSGKTILDFLKSDGFANRNFMQLIHDDSLTFKEDIQKAQVSGQGDSLHEHIANLAGSPAIKKGILQTVKVVDELVKVMGRHKPENIVIEMARENQTTQKGQKNSRERMKRIEEGIKELGSQILKEHPVENTQLQNEKLYLYYLQNGRDMYVDQELDINRLSDYDVDHIVPQSFLKDDSIDNKVLTRSDKNRGKSDNVPSEEVVKKMKNYWRQLLNAKLITQRKFDNLTKAERGGLSELDKAGFIKRQLVETRQITKHVAQILDSRMNTKYDENDKLIREVKVITLKSKLVSDFRKDFQFYKVREINNYHHAHXAYLNAVVGTALIKKYPKLESEFVYGDYKVYDVRKMIAKSEQEIGKATAKYFFYSNIMNFFKTEITLANGEIRKRPLIETNGETGEIVWDKGRDFATVRKVLSMPQVNIVKKTEVQTGGFSKESILPKRNSDKLIARKKDWDPKKYGGFDSPTVAYSVLVVAKVEKGKSKKLKSVKELLGITIMERSSFEKNPIDFLEAKGYKEVKKDLIIKLPKYSLFELENGRKRMLASAGELQKGNELALPSKYVNFLYLASHYEKLKGSPEDNEQKQLFVEQHKHYLDEIIEQISEFSKRVILADANLDKVLSAYNKHRDKPIREQAENIIHLFTLTNLGAPAAFKYFDTTIDRKRYTSTKEVLDATLIHQSITGLYETRIDLSQLGGD

SEQ ID NO: 26 - protein, 1368 aa, Streptococcus pyogenes
MDKKYSIGLDIGTNSVGWAVITDEYKVPSKKFKVLGNTDRHSIKKNLIGALLFDSGETAEATRLKRTARRRYTRRKNRICYLQEIFSNEMAKVDDSFFHRLEESFLVEEDKKHERHPIFGNIVDEVAYHEKYPTIYHLRKKLVDSTDKADLRLIYLALAHMIKFRGHFLIEGDLNPDNSDVDKLFIQLVQTYNQLFEENPINASGVDAKAILSARLSKSRRLENLIAQLPGEKKNGLFGNLIALSLGLTPNFKSNFDLAEDAKLQLSKDTYDDDLDNLLAQIGDQYADLFLAAKNLSDAILLSDILRVNTEITKAPLSASMIKRYDEHHQDLTLLKALVRQQLPEKYKEIFFDQSKNGYAGYIDGGASQEEFYKFIKPILEKMDGTEELLVKLNREDLLRKQRTFDNGSIPHQIHLGELHAILRRQEDFYPFLKDNREKIEKILTFRIPYYVGPLARGNSRFAWMTRKSEETITPWNFEEVVDKGASAQSFIERMTNFDKNLPNEKVLPKHSLLYEYFTVYNELTKVKYVTEGMRKPAFLSGEQKKAIVDLLFKTNRKVTVKQLKEDYFKKIECFDSVEISGVEDRFNASLGTYHDLLKIIKDKDFLDNEENEDILEDIVLTLTLFEDREMIEERLKTYAHLFDDKVMKQLKRRRYTGWGRLSRKLINGIRDKQSGKTILDFLKSDGFANRNFMQLIHDDSLTFKEDIQKAQVSGQGDSLHEHIANLAGSPAIKKGILQTVKVVDELVKVMGRHKPENIVIAMARENQTTQKGQKNSRERMKRIEEGIKELGSQILKEHPVENTQLQNEKLYLYYLQNGRDMYVDQELDINRLSDYDVDHIVPQSFLKDDSIDNKVLTRSDKNRGKSDNVPSEEVVKKMKNYWRQLLNAKLITQRKFDNLTKAERGGLSELDKAGFIKRQLVETRQITKHVAQILDSRMNTKYDENDKLIREVKVITLKSKLVSDFRKDFQFYKVREINNYHHAHDAYLNAVVGTALIKKYPKLESEFVYGDYKVYDVRKMIAKSEQEIGKATAKYFFYSNIMNFFKTEITLANGEIRKRPLIETNGETGEIVWDKGRDFATVRKVLSMPQVNIVKKTEVQTGGFSKESILPKRNSDKLIARKKDWDPKKYGGFDSPTVAYSVLVVAKVEKGKSKKLKSVKELLGITIMERSSFEKNPIDFLEAKGYKEVKKDLIIKLPKYSLFELENGRKRMLASAGELQKGNELALPSKYVNFLYLASHYEKLKGSPEDNEQKQLFVEQHKHYLDEIIEQISEFSKRVILADANLDKVLSAYNKHRDKPIREQAENIIHLFTLTNLGAPAAFKYFDTTIDRKRYTSTKEVLDATLIHQSITGLYETRIDLSQLGGD

SEQ ID NO: 27 - protein, 1368 aa, Streptococcus pyogenes
MDKKYSIGLDIGTNSVGWAVITDEYKVPSKKFKVLGNTDRHSIKKNLIGALLFDSGETAEATRLKRTARRRYTRRKNRICYLQEIFSNEMAKVDDSFFHRLEESFLVEEDKKHERHPIFGNIVDEVAYHEKYPTIYHLRKKLVDSTDKADLRLIYLALAHMIKFRGHFLIEGDLNPDNSDVDKLFIQLVQTYNQLFEENPINASGVDAKAILSARLSKSRRLENLIAQLPGEKKNGLFGNLIALSLGLTPNFKSNFDLAEDAKLQLSKDTYDDDLDNLLAQIGDQYADLFLAAKNLSDAILLSDILRVNTEITKAPLSASMIKRYDEHHQDLTLLKALVRQQLPEKYKEIFFDQSKNGYAGYIDGGASQEEFYKFIKPILEKMDGTEELLVKLNREDLLRKQRTFDNGSIPHQIHLGELHAILRRQEDFYPFLKDNREKIEKILTFRIPYYVGPLARGNSRFAWMTRKSEETITPWNFEEVVDKGASAQSFIERMTNFDKNLPNEKVLPKHSLLYEYFTVYNELTKVKYVTEGMRKPAFLSGEQKKAIVDLLFKTNRKVTVKQLKEDYFKKIECFDSVEISGVEDRFNASLGTYHDLLKIIKDKDFLDNEENEDILEDIVLTLTLFEDREMIEERLKTYAHLFDDKVMKQLKRRRYTGWGRLSRKLINGIRDKQSGKTILDFLKSDGFANRNFMQLIHDDSLTFKEDIQKAQVSGQGDSLHEHIANLAGSPAIKKGILQTVKVVDELVKVMGRHKPENIVIEMARENQTTQKGQKNSRERMKRIEEGIKELGSQILKEHPVENTQLQNEKLYLYYLQNGRDMYVDQELDINRLSDYDVDHIVPQSFLKDDSIDNKVLTRSDKNRGKSDNVPSEEVVKKMKNYWRQLLNAKLITQRKFDNLTKAERGGLSELDKAGFIKRQLVETRQITKHVAQILDSRMNTKYDENDKLIREVKVITLKSKLVSDFRKDFQFYKVREINNYHAAHDAYLNAVVGTALIKKYPKLESEFVYGDYKVYDVRKMIAKSEQEIGKATAKYFFYSNIMNFFKTEITLANGEIRKRPLIETNGETGEIVWDKGRDFATVRKVLSMPQVNIVKKTEVQTGGFSKESILPKRNSDKLIARKKDWDPKKYGGFDSPTVAYSVLVVAKVEKGKSKKLKSVKELLGITIMERSSFEKNPIDFLEAKGYKEVKKDLIIKLPKYSLFELENGRKRMLASAGELQKGNELALPSKYVNFLYLASHYEKLKGSPEDNEQKQLFVEQHKHYLDEIIEQISEFSKRVILADANLDKVLSAYNKHRDKPIREQAENIIHLFTLTNLGAPAAFKYFDTTIDRKRYTSTKEVLDATLIHQSITGLYETRIDLSQLGGD

SEQ ID NO: 28 - protein, 1368 aa, Streptococcus pyogenes
MDKKYSIGLDIGTNSVGWAVITDEYKVPSKKFKVLGNTDRHSIKKNLIGALLFDSGETAEATRLKRTARRRYTRRKNRICYLQEIFSNEMAKVDDSFFHRLEESFLVEEDKKHERHPIFGNIVDEVAYHEKYPTIYHLRKKLVDSTDKADLRLIYLALAHMIKFRGHFLIEGDLNPDNSDVDKLFIQLVQTYNQLFEENPINASGVDAKAILSARLSKSRRLENLIAQLPGEKKNGLFGNLIALSLGLTPNFKSNFDLAEDAKLQLSKDTYDDDLDNLLAQIGDQYADLFLAAKNLSDAILLSDILRVNTEITKAPLSASMIKRYDEHHQDLTLLKALVRQQLPEKYKEIFFDQSKNGYAGYIDGGASQEEFYKFIKPILEKMDGTEELLVKLNREDLLRKQRTFDNGSIPHQIHLGELHAILRRQEDFYPFLKDNREKIEKILTFRIPYYVGPLARGNSRFAWMTRKSEETITPWNFEEVVDKGASAQSFIERMTNFDKNLPNEKVLPKHSLLYEYFTVYNELTKVKYVTEGMRKPAFLSGEQKKAIVDLLFKTNRKVTVKQLKEDYFKKIECFDSVEISGVEDRFNASLGTYHDLLKIIKDKDFLDNEENEDILEDIVLTLTLFEDREMIEERLKTYAHLFDDKVMKQLKRRRYTGWGRLSRKLINGIRDKQSGKTILDFLKSDGFANRNFMQLIHDDSLTFKEDIQKAQVSGQGDSLHEHIANLAGSPAIKKGILQTVKVVDELVKVMGRHKPENIVIEMARENQTTQKGQKNSRERMKRIEEGIKELGSQILKEHPVENTQLQNEKLYLYYLQNGRDMYVDQELDINRLSDYDVDHIVPQSFLKDDSIDNKVLTRSDKNRGKSDNVPSEEVVKKMKNYWRQLLNAKLITQRKFDNLTKAERGGLSELDKAGFIKRQLVETRQITKHVAQILDSRMNTKYDENDKLIREVKVITLKSKLVSDFRKDFQFYKVREINNYHHAHAAYLNAVVGTALIKKYPKLESEFVYGDYKVYDVRKMIAKSEQEIGKATAKYFFYSNIMNFFKTEITLANGEIRKRPLIETNGETGEIVWDKGRDFATVRKVLSMPQVNIVKKTEVQTGGFSKESILPKRNSDKLIARKKDWDPKKYGGFDSPTVAYSVLVVAKVEKGKSKKLKSVKELLGITIMERSSFEKNPIDFLEAKGYKEVKKDLIIKLPKYSLFELENGRKRMLASAGELQKGNELALPSKYVNFLYLASHYEKLKGSPEDNEQKQLFVEQHKHYLDEIIEQISEFSKRVILADANLDKVLSAYNKHRDKPIREQAENIIHLFTLTNLGAPAAFKYFDTTIDRKRYTSTKEVLDATLIHQSITGLYETRIDLSQLGGD

SEQ ID NO: 29 - protein, 1053 aa, Staphylococcus aureus
MGKRNYILGLAIGITSVGYGIIDYETRDVIDAGVRLFKEANVENNEGRRSKRGARRLKRRRRHRIQRVKKLLFDYNLLTDHSELSGINPYEARVKGLSQKLSEEEFSAALLHLAKRRGVHNVNEVEEDTGNELSTKEQISRNSKALEEKYVAELQLERLKKDGEVRGSINRFKTSDYVKEAKQLLKVQKAYHQLDQSFIDTYIDLLETRRTYYEGPGEGSPFGWKDIKEWYEMLMGHCTYFPEELRSVKYAYNADLYNALNDLNNLVITRDENEKLEYYEKFQIIENVFKQKKKPTLKQIAKEILVNEEDIKGYRVTSTGKPEFTNLKVYHDIKDITARKEIIENAELLDQIAKILTIYQSSEDIQEELTNLNSELTQEEIEQISNLKGYTGTHNLSLKAINLILDELWHTNDNQIAIFNRLKLVPKKVDLSQQKEIPTTLVDDFILSPVVKRSFIQSIKVINAIIKKYGLPNDIIIELAREKNSKDAQKMINEMQKRNRQTNERIEEIIRTTGKENAKYLIEKIKLHDMQEGKCLYSLEAIPLEDLLNNPFNYEVDHIIPRSVSFDNSFNNKVLVKQEENSKKGNRTPFQYLSSSDSKISYETFKKHILNLAKGKGRISKTKKEYLLEERDINRFSVQKDFINRNLVDTRYATRGLMNLLRSYFRVNNLDVKVKSINGGFTSFLRRKWKFKKERNKGYKHHAEDALIIANADFIFKEWKKLDKAKKVMENQMFEEKQAESMPEIETEQEYKEIFITPHQIKHIKDFKDYKYSHRVDKKPNRKLINDTLYSTRKDDKGNTLIVNNLNGLYDKDNDKLKKLINKSPEKLLMYHHDPQTYQKLKLIMEQYGDEKNPLYKYYEETGNYLTKYSKKDNGPVIKKIKYYGNKLNAHLDITDDYPNSRNKVVKLSLKPYRFDVYLDNGVYKFVTVKNLDVIKKENYYEVNSKCYEEAKKLKKISNQAEFIASFYKNDLIKINGELYRVIGVNNDLLNRIEVNMIDITYREYLENMNDKRPPHIIKTIASKTQSIKKYSTDILGNLYEVKSKKHPQIIKK

SEQ ID NO: 30 - protein, 1368 aa, Streptococcus pyogenes
  misc_feature (840)..(840): Xaa can be any naturally occurring amino acid
MDKKYSIGLDIGTNSVGWAVITDEYKVPSKKFKVLGNTDRHSIKKNLIGALLFDSGETAEATRLKRTARRRYTRRKNRICYLQEIFSNEMAKVDDSFFHRLEESFLVEEDKKHERHPIFGNIVDEVAYHEKYPTIYHLRKKLVDSTDKADLRLIYLALAHMIKFRGHFLIEGDLNPDNSDVDKLFIQLVQTYNQLFEENPINASGVDAKAILSARLSKSRRLENLIAQLPGEKKNGLFGNLIALSLGLTPNFKSNFDLAEDAKLQLSKDTYDDDLDNLLAQIGDQYADLFLAAKNLSDAILLSDILRVNTEITKAPLSASMIKRYDEHHQDLTLLKALVRQQLPEKYKEIFFDQSKNGYAGYIDGGASQEEFYKFIKPILEKMDGTEELLVKLNREDLLRKQRTFDNGSIPHQIHLGELHAILRRQEDFYPFLKDNREKIEKILTFRIPYYVGPLARGNSRFAWMTRKSEETITPWNFEEVVDKGASAQSFIERMTNFDKNLPNEKVLPKHSLLYEYFTVYNELTKVKYVTEGMRKPAFLSGEQKKAIVDLLFKTNRKVTVKQLKEDYFKKIECFDSVEISGVEDRFNASLGTYHDLLKIIKDKDFLDNEENEDILEDIVLTLTLFEDREMIEERLKTYAHLFDDKVMKQLKRRRYTGWGRLSRKLINGIRDKQSGKTILDFLKSDGFANRNFMQLIHDDSLTFKEDIQKAQVSGQGDSLHEHIANLAGSPAIKKGILQTVKVVDELVKVMGRHKPENIVIEMARENQTTQKGQKNSRERMKRIEEGIKELGSQILKEHPVENTQLQNEKLYLYYLQNGRDMYVDQELDINRLSDYDVDXIVPQSFLKDDSIDNKVLTRSDKNRGKSDNVPSEEVVKKMKNYWRQLLNAKLITQRKFDNLTKAERGGLSELDKAGFIKRQLVETRQITKHVAQILDSRMNTKYDENDKLIREVKVITLKSKLVSDFRKDFQFYKVREINNYHHAHDAYLNAVVGTALIKKYPKLESEFVYGDYKVYDVRKMIAKSEQEIGKATAKYFFYSNIMNFFKTEITLANGEIRKRPLIETNGETGEIVWDKGRDFATVRKVLSMPQVNIVKKTEVQTGGFSKESILPKRNSDKLIARKKDWDPKKYGGFDSPTVAYSVLVVAKVEKGKSKKLKSVKELLGITIMERSSFEKNPIDFLEAKGYKEVKKDLIIKLPKYSLFELENGRKRMLASAGELQKGNELALPSKYVNFLYLASHYEKLKGSPEDNEQKQLFVEQHKHYLDEIIEQISEFSKRVILADANLDKVLSAYNKHRDKPIREQAENIIHLFTLTNLGAPAAFKYFDTTIDRKRYTSTKEVLDATLIHQSITGLYETRIDLSQLGGD

SEQ ID NO: 31 - protein, 1368 aa, Streptococcus pyogenes
  misc_feature (864)..(864): Xaa can be any naturally occurring amino acid
MDKKYSIGLDIGTNSVGWAVITDEYKVPSKKFKVLGNTDRHSIKKNLIGALLFDSGETAEATRLKRTARRRYTRRKNRICYLQEIFSNEMAKVDDSFFHRLEESFLVEEDKKHERHPIFGNIVDEVAYHEKYPTIYHLRKKLVDSTDKADLRLIYLALAHMIKFRGHFLIEGDLNPDNSDVDKLFIQLVQTYNQLFEENPINASGVDAKAILSARLSKSRRLENLIAQLPGEKKNGLFGNLIALSLGLTPNFKSNFDLAEDAKLQLSKDTYDDDLDNLLAQIGDQYADLFLAAKNLSDAILLSDILRVNTEITKAPLSASMIKRYDEHHQDLTLLKALVRQQLPEKYKEIFFDQSKNGYAGYIDGGASQEEFYKFIKPILEKMDGTEELLVKLNREDLLRKQRTFDNGSIPHQIHLGELHAILRRQEDFYPFLKDNREKIEKILTFRIPYYVGPLARGNSRFAWMTRKSEETITPWNFEEVVDKGASAQSFIERMTNFDKNLPNEKVLPKHSLLYEYFTVYNELTKVKYVTEGMRKPAFLSGEQKKAIVDLLFKTNRKVTVKQLKEDYFKKIECFDSVEISGVEDRFNASLGTYHDLLKIIKDKDFLDNEENEDILEDIVLTLTLFEDREMIEERLKTYAHLFDDKVMKQLKRRRYTGWGRLSRKLINGIRDKQSGKTILDFLKSDGFANRNFMQLIHDDSLTFKEDIQKAQVSGQGDSLHEHIANLAGSPAIKKGILQTVKVVDELVKVMGRHKPENIVIEMARENQTTQKGQKNSRERMKRIEEGIKELGSQILKEHPVENTQLQNEKLYLYYLQNGRDMYVDQELDINRLSDYDVDHIVPQSFLKDDSIDNKVLTRSDKNXGKSDNVPSEEVVKKMKNYWRQLLNAKLITQRKFDNLTKAERGGLSELDKAGFIKRQLVETRQITKHVAQILDSRMNTKYDENDKLIREVKVITLKSKLVSDFRKDFQFYKVREINNYHHAHDAYLNAVVGTALIKKYPKLESEFVYGDYKVYDVRKMIAKSEQEIGKATAKYFFYSNIMNFFKTEITLANGEIRKRPLIETNGETGEIVWDKGRDFATVRKVLSMPQVNIVKKTEVQTGGFSKESILPKRNSDKLIARKKDWDPKKYGGFDSPTVAYSVLVVAKVEKGKSKKLKSVKELLGITIMERSSFEKNPIDFLEAKGYKEVKKDLIIKLPKYSLFELENGRKRMLASAGELQKGNELALPSKYVNFLYLASHYEKLKGSPEDNEQKQLFVEQHKHYLDEIIEQISEFSKRVILADANLDKVLSAYNKHRDKPIREQAENIIHLFTLTNLGAPAAFKYFDTTIDRKRYTSTKEVLDATLIHQSITGLYETRIDLSQLGGD

SEQ ID NO: 32 - protein, 1368 aa, Streptococcus pyogenes
MDKKYSIGLDIGTNSVGWAVITDEYKVPSKKFKVLGNTDRHSIKKNLIGALLFDSGETAEATRLKRTARRRYTRRKNRICYLQEIFSNEMAKVDDSFFHRLEESFLVEEDKKHERHPIFGNIVDEVAYHEKYPTIYHLRKKLVDSTDKADLRLIYLALAHMIKFRGHFLIEGDLNPDNSDVDKLFIQLVQTYNQLFEENPINASGVDAKAILSARLSKSRRLENLIAQLPGEKKNGLFGNLIALSLGLTPNFKSNFDLAEDAKLQLSKDTYDDDLDNLLAQIGDQYADLFLAAKNLSDAILLSDILRVNTEITKAPLSASMIKRYDEHHQDLTLLKALVRQQLPEKYKEIFFDQSKNGYAGYIDGGASQEEFYKFIKPILEKMDGTEELLVKLNREDLLRKQRTFDNGSIPHQIHLGELHAILRRQEDFYPFLKDNREKIEKILTFRIPYYVGPLARGNSRFAWMTRKSEETITPWNFEEVVDKGASAQSFIERMTNFDKNLPNEKVLPKHSLLYEYFTVYNELTKVKYVTEGMRKPAFLSGEQKKAIVDLLFKTNRKVTVKQLKEDYFKKIECFDSVEISGVEDRFNASLGTYHDLLKIIKDKDFLDNEENEDILEDIVLTLTLFEDREMIEERLKTYAHLFDDKVMKQLKRRRYTGWGRLSRKLINGIRDKQSGKTILDFLKSDGFANRNFMQLIHDDSLTFKEDIQKAQVSGQGDSLHEHIANLAGSPAIKKGILQTVKVVDELVKVMGRHKPENIVIEMARENQTTQKGQKNSRERMKRIEEGIKELGSQILKEHPVENTQLQNEKLYLYYLQNGRDMYVDQELDINRLSDYDVDHIVPQSFLKDDSIDNKVLTRSDKNAGKSDNVPSEEVVKKMKNYWRQLLNAKLITQRKFDNLTKAERGGLSELDKAGFIKRQLVETRQITKHVAQILDSRMNTKYDENDKLIREVKVITLKSKLVSDFRKDFQFYKVREINNYHHAHDAYLNAVVGTALIKKYPKLESEFVYGDYKVYDVRKMIAKSEQEIGKATAKYFFYSNIMNFFKTEITLANGEIRKRPLIETNGETGEIVWDKGRDFATVRKVLSMPQVNIVKKTEVQTGGFSKESILPKRNSDKLIARKKDWDPKKYGGFDSPTVAYSVLVVAKVEKGKSKKLKSVKELLGITIMERSSFEKNPIDFLEAKGYKEVKKDLIIKLPKYSLFELENGRKRMLASAGELQKGNELALPSKYVNFLYLASHYEKLKGSPEDNEQKQLFVEQHKHYLDEIIEQISEFSKRVILADANLDKVLSAYNKHRDKPIREQAENIIHLFTLTNLGAPAAFKYFDTTIDRKRYTSTKEVLDATLIHQSITGLYETRIDLSQLGGD

SEQ ID NO: 33 - protein, 1367 aa, Streptococcus pyogenes
  misc_feature (839)..(839): Xaa can be any naturally occurring amino acid
DKKYSIGLDIGTNSVGWAVITDEYKVPSKKFKVLGNTDRHSIKKNLIGALLFDSGETAEATRLKRTARRRYTRRKNRICYLQEIFSNEMAKVDDSFFHRLEESFLVEEDKKHERHPIFGNIVDEVAYHEKYPTIYHLRKKLVDSTDKADLRLIYLALAHMIKFRGHFLIEGDLNPDNSDVDKLFIQLVQTYNQLFEENPINASGVDAKAILSARLSKSRRLENLIAQLPGEKKNGLFGNLIALSLGLTPNFKSNFDLAEDAKLQLSKDTYDDDLDNLLAQIGDQYADLFLAAKNLSDAILLSDILRVNTEITKAPLSASMIKRYDEHHQDLTLLKALVRQQLPEKYKEIFFDQSKNGYAGYIDGGASQEEFYKFIKPILEKMDGTEELLVKLNREDLLRKQRTFDNGSIPHQIHLGELHAILRRQEDFYPFLKDNREKIEKILTFRIPYYVGPLARGNSRFAWMTRKSEETITPWNFEEVVDKGASAQSFIERMTNFDKNLPNEKVLPKHSLLYEYFTVYNELTKVKYVTEGMRKPAFLSGEQKKAIVDLLFKTNRKVTVKQLKEDYFKKIECFDSVEISGVEDRFNASLGTYHDLLKIIKDKDFLDNEENEDILEDIVLTLTLFEDREMIEERLKTYAHLFDDKVMKQLKRRRYTGWGRLSRKLINGIRDKQSGKTILDFLKSDGFANRNFMQLIHDDSLTFKEDIQKAQVSGQGDSLHEHIANLAGSPAIKKGILQTVKVVDELVKVMGRHKPENIVIEMARENQTTQKGQKNSRERMKRIEEGIKELGSQILKEHPVENTQLQNEKLYLYYLQNGRDMYVDQELDINRLSDYDVDXIVPQSFLKDDSIDNKVLTRSDKNRGKSDNVPSEEVVKKMKNYWRQLLNAKLITQRKFDNLTKAERGGLSELDKAGFIKRQLVETRQITKHVAQILDSRMNTKYDENDKLIREVKVITLKSKLVSDFRKDFQFYKVREINNYHHAHDAYLNAVVGTALIKKYPKLESEFVYGDYKVYDVRKMIAKSEQEIGKATAKYFFYSNIMNFFKTEITLANGEIRKRPLIETNGETGEIVWDKGRDFATVRKVLSMPQVNIVKKTEVQTGGFSKESILPKRNSDKLIARKKDWDPKKYGGFDSPTVAYSVLVVAKVEKGKSKKLKSVKELLGITIMERSSFEKNPIDFLEAKGYKEVKKDLIIKLPKYSLFELENGRKRMLASAGELQKGNELALPSKYVNFLYLASHYEKLKGSPEDNEQKQLFVEQHKHYLDEIIEQISEFSKRVILADANLDKVLSAYNKHRDKPIREQAENIIHLFTLTNLGAPAAFKYFDTTIDRKRYTSTKEVLDATLIHQSITGLYETRIDLSQLGGD

SEQ ID NO: 34 - protein, 1367 aa, Streptococcus pyogenes
DKKYSIGLDIGTNSVGWAVITDEYKVPSKKFKVLGNTDRHSIKKNLIGALLFDSGETAEATRLKRTARRRYTRRKNRICYLQEIFSNEMAKVDDSFFHRLEESFLVEEDKKHERHPIFGNIVDEVAYHEKYPTIYHLRKKLVDSTDKADLRLIYLALAHMIKFRGHFLIEGDLNPDNSDVDKLFIQLVQTYNQLFEENPINASGVDAKAILSARLSKSRRLENLIAQLPGEKKNGLFGNLIALSLGLTPNFKSNFDLAEDAKLQLSKDTYDDDLDNLLAQIGDQYADLFLAAKNLSDAILLSDILRVNTEITKAPLSASMIKRYDEHHQDLTLLKALVRQQLPEKYKEIFFDQSKNGYAGYIDGGASQEEFYKFIKPILEKMDGTEELLVKLNREDLLRKQRTFDNGSIPHQIHLGELHAILRRQEDFYPFLKDNREKIEKILTFRIPYYVGPLARGNSRFAWMTRKSEETITPWNFEEVVDKGASAQSFIERMTNFDKNLPNEKVLPKHSLLYEYFTVYNELTKVKYVTEGMRKPAFLSGEQKKAIVDLLFKTNRKVTVKQLKEDYFKKIECFDSVEISGVEDRFNASLGTYHDLLKIIKDKDFLDNEENEDILEDIVLTLTLFEDREMIEERLKTYAHLFDDKVMKQLKRRRYTGWGRLSRKLINGIRDKQSGKTILDFLKSDGFANRNFMQLIHDDSLTFKEDIQKAQVSGQGDSLHEHIANLAGSPAIKKGILQTVKVVDELVKVMGRHKPENIVIEMARENQTTQKGQKNSRERMKRIEEGIKELGSQILKEHPVENTQLQNEKLYLYYLQNGRDMYVDQELDINRLSDYDVDAIVPQSFLKDDSIDNKVLTRSDKNRGKSDNVPSEEVVKKMKNYWRQLLNAKLITQRKFDNLTKAERGGLSELDKAGFIKRQLVETRQITKHVAQILDSRMNTKYDENDKLIREVKVITLKSKLVSDFRKDFQFYKVREINNYHHAHDAYLNAVVGTALIKKYPKLESEFVYGDYKVYDVRKMIAKSEQEIGKATAKYFFYSNIMNFFKTEITLANGEIRKRPLIETNGETGEIVWDKGRDFATVRKVLSMPQVNIVKKTEVQTGGFSKESILPKRNSDKLIARKKDWDPKKYGGFDSPTVAYSVLVVAKVEKGKSKKLKSVKELLGITIMERSSFEKNPIDFLEAKGYKEVKKDLIIKLPKYSLFELENGRKRMLASAGELQKGNELALPSKYVNFLYLASHYEKLKGSPEDNEQKQLFVEQHKHYLDEIIEQISEFSKRVILADANLDKVLSAYNKHRDKPIREQAENIIHLFTLTNLGAPAAFKYFDTTIDRKRYTSTKEVLDATLIHQSITGLYETRIDLSQLGGD

SEQ ID NO: 35 - protein, 1367 aa, Streptococcus pyogenes
  misc_feature (863)..(863): Xaa can be any naturally occurring amino acid
DKKYSIGLDIGTNSVGWAVITDEYKVPSKKFKVLGNTDRHSIKKNLIGALLFDSGETAEATRLKRTARRRYTRRKNRICYLQEIFSNEMAKVDDSFFHRLEESFLVEEDKKHERHPIFGNIVDEVAYHEKYPTIYHLRKKLVDSTDKADLRLIYLALAHMIKFRGHFLIEGDLNPDNSDVDKLFIQLVQTYNQLFEENPINASGVDAKAILSARLSKSRRLENLIAQLPGEKKNGLFGNLIALSLGLTPNFKSNFDLAEDAKLQLSKDTYDDDLDNLLAQIGDQYADLFLAAKNLSDAILLSDILRVNTEITKAPLSASMIKRYDEHHQDLTLLKALVRQQLPEKYKEIFFDQSKNGYAGYIDGGASQEEFYKFIKPILEKMDGTEELLVKLNREDLLRKQRTFDNGSIPHQIHLGELHAILRRQEDFYPFLKDNREKIEKILTFRIPYYVGPLARGNSRFAWMTRKSEETITPWNFEEVVDKGASAQSFIERMTNFDKNLPNEKVLPKHSLLYEYFTVYNELTKVKYVTEGMRKPAFLSGEQKKAIVDLLFKTNRKVTVKQLKEDYFKKIECFDSVEISGVEDRFNASLGTYHDLLKIIKDKDFLDNEENEDILEDIVLTLTLFEDREMIEERLKTYAHLFDDKVMKQLKRRRYTGWGRLSRKLINGIRDKQSGKTILDFLKSDGFANRNFMQLIHDDSLTFKEDIQKAQVSGQGDSLHEHIANLAGSPAIKKGILQTVKVVDELVKVMGRHKPENIVIEMARENQTTQKGQKNSRERMKRIEEGIKELGSQILKEHPVENTQLQNEKLYLYYLQNGRDMYVDQELDINRLSDYDVDHIVPQSFLKDDSIDNKVLTRSDKNXGKSDNVPSEEVVKKMKNYWRQLLNAKLITQRKFDNLTKAERGGLSELDKAGFIKRQLVETRQITKHVAQILDSRMNTKYDENDKLIREVKVITLKSKLVSDFRKDFQFYKVREINNYHHAHDAYLNAVVGTALIKKYPKLESEFVYGDYKVYDVRKMIAKSEQEIGKATAKYFFYSNIMNFFKTEITLANGEIRKRPLIETNGETGEIVWDKGRDFATVRKVLSMPQVNIVKKTEVQTGGFSKESILPKRNSDKLIARKKDWDPKKYGGFDSPTVAYSVLVVAKVEKGKSKKLKSVKELLGITIMERSSFEKNPIDFLEAKGYKEVKKDLIIKLPKYSLFELENGRKRMLASAGELQKGNELALPSKYVNFLYLASHYEKLKGSPEDNEQKQLFVEQHKHYLDEIIEQISEFSKRVILADANLDKVLSAYNKHRDKPIREQAENIIHLFTLTNLGAPAAFKYFDTTIDRKRYTSTKEVLDATLIHQSITGLYETRIDLSQLGGD

SEQ ID NO: 36 - protein, 1367 aa, Streptococcus pyogenes
DKKYSIGLDIGTNSVGWAVITDEYKVPSKKFKVLGNTDRHSIKKNLIGALLFDSGETAEATRLKRTARRRYTRRKNRICYLQEIFSNEMAKVDDSFFHRLEESFLVEEDKKHERHPIFGNIVDEVAYHEKYPTIYHLRKKLVDSTDKADLRLIYLALAHMIKFRGHFLIEGDLNPDNSDVDKLFIQLVQTYNQLFEENPINASGVDAKAILSARLSKSRRLENLIAQLPGEKKNGLFGNLIALSLGLTPNFKSNFDLAEDAKLQLSKDTYDDDLDNLLAQIGDQYADLFLAAKNLSDAILLSDILRVNTEITKAPLSASMIKRYDEHHQDLTLLKALVRQQLPEKYKEIFFDQSKNGYAGYIDGGASQEEFYKFIKPILEKMDGTEELLVKLNREDLLRKQRTFDNGSIPHQIHLGELHAILRRQEDFYPFLKDNREKIEKILTFRIPYYVGPLARGNSRFAWMTRKSEETITPWNFEEVVDKGASAQSFIERMTNFDKNLPNEKVLPKHSLLYEYFTVYNELTKVKYVTEGMRKPAFLSGEQKKAIVDLLFKTNRKVTVKQLKEDYFKKIECFDSVEISGVEDRFNASLGTYHDLLKIIKDKDFLDNEENEDILEDIVLTLTLFEDREMIEERLKTYAHLFDDKVMKQLKRRRYTGWGRLSRKLINGIRDKQSGKTILDFLKSDGFANRNFMQLIHDDSLTFKEDIQKAQVSGQGDSLHEHIANLAGSPAIKKGILQTVKVVDELVKVMGRHKPENIVIEMARENQTTQKGQKNSRERMKRIEEGIKELGSQILKEHPVENTQLQNEKLYLYYLQNGRDMYVDQELDINRLSDYDVDHIVPQSFLKDDSIDNKVLTRSDKNAGKSDNVPSEEVVKKMKNYWRQLLNAKLITQRKFDNLTKAERGGLSELDKAGFIKRQLVETRQITKHVAQILDSRMNTKYDENDKLIREVKVITLKSKLVSDFRKDFQFYKVREINNYHHAHDAYLNAVVGTALIKKYPKLESEFVYGDYKVYDVRKMIAKSEQEIGKATAKYFFYSNIMNFFKTEITLANGEIRKRPLIETNGETGEIVWDKGRDFATVRKVLSMPQVNIVKKTEVQTGGFSKESILPKRNSDKLIARKKDWDPKKYGGFDSPTVAYSVLVVAKVEKGKSKKLKSVKELLGITIMERSSFEKNPIDFLEAKGYKEVKKDLIIKLPKYSLFELENGRKRMLASAGELQKGNELALPSKYVNFLYLASHYEKLKGSPEDNEQKQLFVEQHKHYLDEIIEQISEFSKRVILADANLDKVLSAYNKHRDKPIREQAENIIHLFTLTNLGAPAAFKYFDTTIDRKRYTSTKEVLDATLIHQSITGLYETRIDLSQLGGD

SEQ ID NO: 37 - protein, 1053 aa, Staphylococcus aureus; identical to SEQ ID NO: 11

SEQ ID NO: 38 - protein, 1082 aa, N. meningitidis
MAAFKPNSINYILGLDIGIASVGWAMVEIDEEENPIRLIDLGVRVFERAEVPKTGDSLAMARRLARSVRRLTRRRAHRLLRTRRLLKREGVLQAANFDENGLIKSLPNTPWQLRAAALDRKLTPLEWSAVLLHLIKHRGYLSQRKNEGETADKELGALLKGVAGNAHALQTGDFRTPAELALNKFEKESGHIRNQRSDYSHTFSRKDLQAELILLFEKQKEFGNPHVSGGLKEGIETLLMTQRPALSGDAVQKMLGHCTFEPAEPKAAKNTYTAERFIWLTKLNNLRILEQGSERPLTDTERATLMDEPYRKSKLTYAQARKLLGLEDTAFFKGLRYGKDNAEASTLMEMKAYHAISRALEKEGLKDKKSPLNLSPELQDEIGTAFSLFKTDEDITGRLKDRIQPEILEALLKHISFDKFVQISLKALRRIVPLMEQGKRYDEACAEIYGDHYGKKNTEEKIYLPPIPADEIRNPVVLRALSQARKVINGVVRRYGSPARIHIETAREVGKSFKDRKEIEKRQEENRKDREKAAAKFREYFPNFVGEPKSKDILKLRLYEQQHGKCLYSGKEINLGRLNEKGYVEIDAALPFSRTWDDSFNNKVLVLGSENQNKGNQTPYEYFNGKDNSREWQEFKARVETSRFPRSKKQRILLQKFDEDGFKERNLNDTRYVNRFLCQFVADRMRLTGKGKKRVFASNGQITNLLRGFWGLRKVRAENDRHHALDAVVVACSTVAMQQKITRFVRYKEMNAFDGKTIDKETGEVLHQKTHFPQPWEFFAQEVMIRVFGKPDGKPEFEEADTLEKLRTLLAEKLSSRPEAVHEYVTPLFVSRAPNRKMSGQGHMETVKSAKRLDEGVSVLRVPLTQLKLKDLEKMVNREREPKLYEALKARLEAHKDDPAKAFAEPFYKYDKAGNRTQQVKAVRVEQVQKTGVWVRNHNGIADNATMVRVDVFEKGDKYYLVPIYSWQVAKGILPDRAVVQGKDEEDWQLIDDSFNFKFSLHPNDLVEVITKKARMFGYFASCHRGTGNINIRIHDLDHKIGKNGILEGIGVKTALSFQKYQIDELGKEIRPCRLKKRPPVR

SEQ ID NO: 39 - protein, 984 aa, C. jejuni
MARILAFDIGISSIGWAFSENDELKDCGVRIFTKVENPKTGESLALPRRLARSARKRLARRKARLNHLKHLIANEFKLNYEDYQSFDESLAKAYKGSLISPYELRFRALNELLSKQDFARVILHIAKRRGYDDIKNSDDKEKGAILKAIKQNEEKLANYQSVGEYLYKEYFQKFKENSKEFTNVRNKKESYERCIAQSFLKDELKLIFKKQREFGFSFSKKFEEEVLSVAFYKRALKDFSHLVGNCSFFTDEKRAPKNSPLAFMFVALTRIINLLNNLKNTEGILYTKDDLNALLNEVLKNGTLTYKQTKKLLGLSDDYEFKGEKGTYFIEFKKYKEFIKALGEHNLSQDDLNEIAKDITLIKDEIKLKKALAKYDLNQNQIDSLSKLEFKDHLNISFKALKLVTPLMLEGKKYDEACNELNLKVAINEDKKDFLPAFNETYYKDEVTNPVVLRAIKEYRKVLNALLKKYGKVHKINIELAREVGKNHSQRAKIEKEQNENYKAKKDAELECEKLGLKINSKNILKLRLFKEQKEFCAYSGEKIKISDLQDEKMLEIDHIYPYSRSFDDSYMNKVLVFTKQNQEKLNQTPFEAFGNDSAKWQKIEVLAKNLPTKKQKRILDKNYKDKEQKNFKDRNLNDTRYIARLVLNYTKDYLDFLPLSDDENTKLNDTQKGSKVHVEAKSGMLTSALRHTWGFSAKDRNNHLHHAIDAVIIAYANNSIVKAFSDFKKEQESNSAELYAKKISELDYKNKRKFFEPFSGFRQKVLDKIDEIFVSKPERKKPSGALHEETFRKEEEFYQSYGGKEGVLKALELGKIRKVNGKIVKNGDMFRVDIFKHKKTNKFYAVPIYTMDFALKVLPNKAVARSKKGEIKDWILMDENYEFCFSLYKDSLILIQTKDMQEPEFVYYNAFTSSTVSLIVSKHDNKFETLSKNQKILFKNANEKEVIAKSIGIQNLKVFEKYIVSALGEVTKAEFRQREDFKK

SEQ ID NO: 40 - protein, 1087 aa, G. stearothermophilus
MRYKIGLDIGITSVGWAVMNLDIPRIEDLGVRIFDRAENPQTGESLALPRRLARSARRRLRRRKHRLERIRRLVIREGILTKEELDKLFEEKHEIDVWQLRVEALDRKLNNDELARVLLHLAKRRGFKSNRKSERSNKENSTMLKHIEENRAILSSYRTVGEMIVKDPKFALHKRNKGENYTNTIARDDLEREIRLIFSKQREFGNMSCTEEFENEYITIWASQRPVASKDDIEKKVGFCTFEPKEKRAPKATYTFQSFIAWEHINKLRLISPSGARGLTDEERRLLYEQAFQKNKITYHDIRTLLHLPDDTYFKGIVYDRGESRKQNENIRFLELDAYHQIRKAVDKVYGKGKSSSFLPIDFDTFGYALTLFKDDADIHSYLRNEYEQNGKRMPNLANKVYDNELIEELLNLSFTKFGHLSLKALRSILPYMEQGEVYSSACERAGYTFTGPKKKQKTMLLPNIPPIANPVVMRALTQARKVVNAIIKKYGSPVSIHIELARDLSQTFDERRKTKKEQDENRKKNETAIRQLMEYGLTLNPTGHDIVKFKLWSEQNGRCAYSLQPIEIERLLEPGYVEVDHVIPYSRSLDDSYTNKVLVLTRENREKGNRIPAEYLGVGTERWQQFETFVLTNKQFSKKKRDRLLRLHYDENEETEFKNRNLNDTRYISRFFANFIREHLKFAESDDKQKVYTVNGRVTAHLRSRWEFNKNREESDLHHAVDAVIVACTTPSDIAKVTAFYQRREQNKELAKKTEPHFPQPWPHFADELRARLSKHPKESIKALNLGNYDDQKLESLQPVFVSRMPKRSVTGAAHQETLRRYVGIDERSGKIQTVVKTKLSEIKLDASGHFPMYGKESDPRTYEAIRQRLLEHNNDPKKAFQEPLYKPKKNGEPGPVIRTVKIIDTKNQVIPLNDGKTVAYNSNIVRVDVFEKDGKYYCVPVYTMDIMKGILPNKAIEPNKPYSEWKEMTEDYTFRFSLYPNDLIRIELPREKTVKTAAGEEINVKDVFVYYKTIDSANGGLELISHDHRFSLRGVGSRTLKRFEKYQVDVLGNIYKVRGEKRVGLASSAHSKPGKTIRPLQSTRD

SEQ ID NO: 41 - protein, 1228 aa, L. bacterium
MSKLEKFTNCYSLSKTLRFKAIPVGKTQENIDNKRLLVEDEKRAEDYKGVKKLLDRYYLSFINDVLHSIKLKNLNNYISLFRKKTRTEKENKELENLEINLRKEIAKAFKGNEGYKSLFKKDIIETILPEFLDDKDEIALVNSFNGFTTAFTGFFDNRENMFSEEAKSTSIAFRCINENLTRYISNMDIFEKVDAIFDKHEVQEIKEKILNSDYDVEDFFEGEFFNFVLTQEGIDVYNAIIGGFVTESGEKIKGLNEYINLYNQKTKQKLPKFKPLYKQVLSDRESLSFYGEGYTSDEEVLEVFRNTLNKNSEIFSSIKKLEKLFKNFDEYSSAGIFVKNGPAISTISKDIFGEWNVIRDKWNAEYDDIHLKKKAVVTEKYEDDRRKSFKKIGSFSLEQLQEYADADLSVVEKLKEIIIQKVDEIYKVYGSSEKLFDADFVLEKSLKKNDAVVAIMKDLLDSVKSFENYIKAFFGEGKETNRDESFYGDFVLAYDILLKVDHIYDAIRNYVTQKPYSKDKFKLYFQNPQFMGGWDKDKETDYRATILRYGSKYYLAIMDKKYAKCLQKIDKDDVNGNYEKINYKLLPGPNKMLPKVFFSKKWMAYYNPSEDIQKIYKNGTFKKGDMFNLNDCHKLIDFFKDSISRYPKWSNAYDFNFSETEKYKDIAGFYREVEEQGYKVSFESASKKEVDKLVEEGKLYMFQIYNKDFSDKSHGTPNLHTMYFKLLFDENNHGQIRLSGGAELFMRRASLKKEELVVHPANSPIANKNPDNPKKTTTLSYDVYKDKRFSEDQYELHIPIAINKCPKNIFKINTEVRVLLKHDDNPYVIGIDRGERNLLYIVVVDGKGNIVEQYSLNEIINNFNGIRIKTDYHSLLDKKEKERFEARQNWTSIENIKELKAGYISQVVHKICELVEKYDAVIALEDLNSGFKNSRVKVEKQVYQKFEKMLIDKLNYMVDKKSNPCATGGALKGYQITNKFESFKSMSTQNGFIFYIPAWLTSKIDPSTGFVNLLKTKYTSIADSKKFISSFDRIMYVPEEDLFEFALDYKNFSRTDADYIKKWKLYSYGNRIRIFRNPKKNNVFDWEEVCLTSAYKELFNKYGINYQQGDIRALLCEQSDKAFYSSFMALMSLMLQMRNSITGRTDVDFLISPVKNSDGIFYDSRNYEAQENAILPKNADANGAYNIARKVLWAIGQFKKAEDEKLDKVKIAISNKEWLEYAQTSVKH

SEQ ID NO: 42 - protein, 1108 aa, B. hisashii
MATRSFILKIEPNEEVKKGLWKTHEVLNHGIAYYMNILKLIRQEAIYEHHEQDPKNPKKVSKAEIQAELWDFVLKMQKCNSFTHEVDKDEVFNILRELYEELVPSSVEKKGEANQLSNKFLYPLVDPNSQSGKGTASSGRKPRWYNLKIAGDPSWEEEKKKWEEDKKKDPLAKILGKLAEYGLIPLFIPYTDSNEPIVKEIKWMEKSRNQSVRRLDKDMFIQALERFLSWESWNLKVKEEYEKVEKEYKTLEERIKEDIQALKALEQYEKERQEQLLRDTLNTNEYRLSKRGLRGWREIIQKWLKMDENEPSEKYLEVFKDYQRKHPREAGDYSVYEFLSKKENHFIWRNHPEYPYLYATFCEIDKKKKDAKQQATFTLADPINHPLWVRFEERSGSNLNKYRILTEQLHTEKLKKKLTVQLDRLIYPTESGGWEEKGKVDIVLLPSRQFYNQIFLDIEEKGKHAFTYKDESIKFPLKGTLGGARVQFDRDHLRRYPHKVESGNVGRIYFNMTVNIEPTESPVSKSLKIHRDDFPKVVNFKPKELTEWIKDSKGKKLKSGIESLEIGLRVMSIDLGQRQAAAASIFEVVDQKPDIEGKLFFPIKGTELYAVHRASFNIKLPGETLVKSREVLRKAREDNLKLMNQKLNFLRNVLHFQQFEDITEREKRVTKWISRQENSDVPLVYQDELIQIRELMYKPYKDWVAFLKQLHKRLEVEIGKEVKHWRKSLSDGRKGLYGISLKNIDEIDRTRKFLLRWSLRPTEPGEVRRLEPGQRFAIDQLNHLNALKEDRLKKMANTIIMHALGYCYDVRKKKWQAKNPACQIILFEDLSNYNPYEERSRFENSKLMKWSRREIPRQVALQGEIYGLQVGEVGAQFSSRFHAKTGSPGIRCSVVTKEKLQDNRFFKNLQREGRLTLDKIAVLKEGDLYPDKGGEKFISLSKDRKCVTTHADINAAQNLQKRFWTRTHGFYKVYCKAYQVDGQTVYIPESKDQKQKIIEEFGEGYFILKDGVYEWVNAGKLKIKKGSSKQSSSELVDSDILKDSFDLASELKGEKLMLYRDPSGNVFPSDKWMAAGVFFGKLERILISKLTNQYSISTIEDDSSKQSM

SEQ ID NO: 43 - protein, 1307 aa, Acidaminococcus sp.
MTQFEGFTNLYQVSKTLRFELIPQGKTLKHIQEQGFIEEDKARNDHYKELKPIIDRIYKTYADQCLQLVQLDWENLSAAIDSYRKEKTEETRNALIEEQATYRNAIHDYFIGRTDNLTDAINKRHAEIYKGLFKAELFNGKVLKQLGTVTTTEHENALLRSFDKFTTYFSGFYENRKNVFSAEDISTAIPHRIVQDNFPKFKENCHIFTRLITAVPSLREHFENVKKAIGIFVSTSIEEVFSFPFYNQLLTQTQIDLYNQLLGGISREAGTEKIKGLNEVLNLAIQKNDETAHIIASLPHRFIPLFKQILSDRNTLSFILEEFKSDEEVIQSFCKYKTLLRNENVLETAEALFNELNSIDLTHIFISHKKLETISSALCDHWDTLRNALYERRISELTGKITKSAKEKVQRSLKHEDINLQEIISAAGKELSEAFKQKTSEILSHAHAALDQPLPTTLKKQEEKEILKSQLDSLLGLYHLLDWFAVDESNEVDPEFSARLTGIKLEMEPSLSFYNKARNYATKKPYSVEKFKLNFQMPTLASGWDVNKEKNNGAILFVKNGLYYLGIMPKQKGRYKALSFEPTEKTSEGFDKMYYDYFPDAAKMIPKCSTQLKAVTAHFQTHTTPILLSNNFIEPLEITKEIYDLNNPEKEPKKFQTAYAKKTGDQKGYREALCKWIDFTRDFLSKYTKTTSIDLSSLRPSSQYKDLGEYYAELNPLLYHISFQRIAEKEIMDAVETGKLYLFQIYNKDFAKGHHGKPNLHTLYWTGLFSPENLAKTSIKLNGQAELFYRPKSRMKRMAHRLGEKMLNKKLKDQKTPIPDTLYQELYDYVNHRLSHDLSDEARALLPNVITKEVSHEIIKDRRFTSDKFFFHVPITLNYQAANSPSKFNQRVNAYLKEHPETPIIGIDRGERNLIYITVIDSTGKILEQRSLNTIQQFDYQKKLDNREKERVAARQAWSVVGTIKDLKQGYLSQVIHEIVDLMIHYQAVVVLENLNFGFKSKRTGIAEKAVYQQFEKMLIDKLNCLVLKDYPAEKVGGVLNPYQLTDQFTSFAKMGTQSGFLFYVPAPYTSKIDPLTGFVDPFVWKTIKNHESRKHFLEGFDFLHYDVKTGDFILHFKMNRNLSFQRGLPGFMPAWDIVFEKNETQFDAKGTPFIAGKRIVPVIENHRFTGRYRDLYPANELIALLEEKGIVFRDGSNILPKLLENDDSHAIDTMVALIRSVLQMRNSNAATGEDYINSPVRDLNGVCFDSRFQNPEWPMDADANGAYHIALKGQLLLNHLKESKDLKLQNGISNQDWLAYIQELRN

SEQ ID NO: 44 - protein, 1307 aa, Artificial Sequence
  Synthetic
MTQFEGFTNLYQVSKTLRFELIPQGKTLKHIQEQGFIEEDKARNDHYKELKPIIDRIYKTYADQCLQLVQLDWENLSAAIDSYRKEKTEETRNALIEEQATYRNAIHDYFIGRTDNLTDAINKRHAEIYKGLFKAELFNGKVLKQLGTVTTTEHENALLRSFDKFTTYFSGFYENRKNVFSAEDISTAIPHRIVQDNFPKFKENCHIFTRLITAVPSLREHFENVKKAIGIFVSTSIEEVFSFPFYNQLLTQTQIDLYNQLLGGISREAGTEKIKGLNEVLNLAIQKNDETAHIIASLPHRFIPLFKQILSDRNTLSFILEEFKSDEEVIQSFCKYKTLLRNENVLETAEALFNELNSIDLTHIFISHKKLETISSALCDHWDTLRNALYERRISELTGKITKSAKEKVQRSLKHEDINLQEIISAAGKELSEAFKQKTSEILSHAHAALDQPLPTTLKKQEEKEILKSQLDSLLGLYHLLDWFAVDESNEVDPEFSARLTGIKLEMEPSLSFYNKARNYATKKPYSVEKFKLNFQMPTLASGWDVNKEKNNGAILFVKNGLYYLGIMPKQKGRYKALSFEPTEKTSEGFDKMYYDYFPDAAKMIPKCSTQLKAVTAHFQTHTTPILLSNNFIEPLEITKEIYDLNNPEKEPKKFQTAYAKKTGDQKGYREALCKWIDFTRDFLSKYTKTTSIDLSSLRPSSQYKDLGEYYAELNPLLYHISFQRIAEKEIMDAVETGKLYLFQIYNKDFAKGHHGKPNLHTLYWTGLFSPENLAKTSIKLNGQAELFYRPKSRMKRMAHRLGEKMLNKKLKDQKTPIPDTLYQELYDYVNHRLSHDLSDEARALLPNVITKEVSHEIIKDRRFTSDKFFFHVPITLNYQAANSPSKFNQRVNAYLKEHPETPIIGIDRGERNLIYITVIDSTGKILEQRSLNTIQQFDYQKKLDNREKERVAARQAWSVVGTIKDLKQGYLSQVIHEIVDLMIHYQAVVVLENLNFGFKSKRTGIAEKAVYQQFEKMLIDKLNCLVLKDYPAEKVGGVLNPYQLTDQFTSFAKMGTQSGFLFYVPAPYTSKIDPLTGFVDPFVWKTIKNHESRKHFLEGFDFLHYDVKTGDFILHFKMNRNLSFQRGLPGFMPAWDIVFEKNETQFDAKGTPFIAGKRIVPVIENHRFTGRYRDLYPANELIALLEEKGIVFRDGSNILPKLLENDDSHAIDTMVALIRSVLQMANSNAATGEDYINSPVRDLNGVCFDSRFQNPEWPMDADANGAYHIALKGQLLLNHLKESKDLKLQNGISNQDWLAYIQELRN

SEQ ID NO: 45 - protein, 1259 aa, Lachnospiraceae bacterium
MNYKTGLEDFIGKESLSKTLRNALIPTESTKIHMEEMGVIRDDELRAEKQQELKEIMDDYYRTFIEEKLGQIQGIQWNSLFQKMEETMEDISVRKDLDKIQNEKRKEICCYFTSDKRFKDLFNAKLITDILPNFIKDNKEYTEEEKAEKEQTRVLFQRFATAFTNYFNQRRNNFSEDNISTAISFRIVNENSEIHLQNMRAFQRIEQQYPEEVCGMEEEYKDMLQEWQMKHIYSVDFYDRELTQPGIEYYNGICGKINEHMNQFCQKNRINKNDFRMKKLHKQILCKKSSYYEIPFRFESDQEVYDALNEFIKTMKKKEIIRRCVHLGQECDDYDLGKIYISSNKYEQISNALYGSWDTIRKCIKEEYMDALPGKGEKKEEKAEAAAKKEEYRSIADIDKIISLYGSEMDRTISAKKCITEICDMAGQISIDPLVCNSDIKLLQNKEKTTEIKTILDSFLHVYQWGQTFIVSDIIEKDSYFYSELEDVLEDFEGITTLYNHVRSYVTQKPYSTVKFKLHFGSPTLANGWSQSKEYDNNAILLMRDQKFYLGIFNVRNKPDKQIIKGHEKEEKGDYKKMIYNLLPGPSKMLPKVFITSRSGQETYKPSKHILDGYNEKRHIKSSPKFDLGYCWDLIDYYKECIHKHPDWKNYDFHFSDTKDYEDISGFYREVEMQGYQIKWTYISADEIQKLDEKGQIFLFQIYNKDFSVHSTGKDNLHTMYLKNLFSEENLKDIVLKLNGEAELFFRKASIKTPIVHKKGSVLVNRSYTQTVGNKEIRVSIPEEYYTEIYNYLNHIGKGKLSSEAQRYLDEGKIKSFTATKDIVKNYRYCCDHYFLHLPITINFKAKSDVAVNERTLAYIAKKEDIHIIGIDRGERNLLYISVVDVHGNIREQRSFNIVNGYDYQQKLKDREKSRDAARKNWEEIEKIKELKEGYLSMVIHYIAQLVVKYNAVVAMEDLNYGFKTGRFKVERQVYQKFETMLIEKLHYLVFKDREVCEEGGVLRGYQLTYIPESLKKVGKQCGFIFYVPAGYTSKIDPTTGFVNLFSFKNLTNRESRQDFVGKFDEIRYDRDKKMFEFSFDYNNYIKKGTILASTKWKVYTNGTRLKRIVVNGKYTSQSMEVELTDAMEKMLQRAGIEYHDGKDLKGQIVEKGIEAEIIDIFRLTVQMRNSRSESEDREYDRLISPVLNDKGEFFDTATADKTLPQDADANGAYCIALKGLYEVKQIKENWKENEQFPRNKLVQDNKTWFDFMQKKRYL

SEQ ID NO: 46 - protein, 1306 aa, Prevotella copri
MAKNFEDFKRLYSLSKTLRFEAKPIGATLDNIVKSGLLDEDEHRAASYVKVKKLIDEYHKVFIDRVLDDGCLPLENKGNNNSLAEYYESYVSRAQDEDAKKKFKEIQQNLRSVIAKKLTEDKAYANLFGNKLIESYKDKEDKKKIIDSDLIQFINTAESTQLDSMSQDEAKELVKEFWGFVTYFYGFFDNRKNMYTAEEKSTGIAYRLVNENLPKFIDNIEAFNRAITRPEIQENMGVLYSDFSEYLNVESIQEMFQLDYYNMLLTQKQIDVYNAIIGGKTDDEHDVKIKGINEYINLYNQQHKDDKLPKLKALFKQILSDRNAISWLPEEFNSDQEVLNAIKDCYERLAENVLGDKVLKSLLGSLADYSLDGIFIRNDLQLTDISQKMFGNWGVIQNAIMQNIKRVAPARKHKESEEDYEKRIAGIFKKADSFSISYINDCLNEADPNNAYFVENYFATFGAVNTPTMQRENLFALVQNAYTEVAALLHSDYPTVKHLAQDKANVSKIKALLDAIKSLQHFVKPLLGKGDESDKDERFYGELASLWAELDTVTPLYNMIRNYMTRKPYSQKKIKLNFENPQLLGGWDANKEKDYATIILRRNGLYYLAIMDKDSRKLLGKAMPSDGECYEKMVYKFFKDVTTMIPKCSTQLKDVQAYFKVNTDDYVLNSKAFNKPLTITKEVFDLNNVLYGKYKKFQKGYLTATGDNVGYTHAVNVWIKFCMDFLNSYDSTCIYDFSSLKPESYLSLDAFYQDANLLLYKLSFARASVSYINQLVEEGKMYLFQIYNKDFSEYSKGTPNMHTLYWKALFDERNLADVVYKLNGQAEMFYRKKSIENTHPTHPANHPILNKNKDNKKKESLFDYDLIKDRRYTVDKFMFHVPITMNFKSVGSENINQDVKAYLRHADDMHIIGIDRGERHLLYLVVIDLQGNIKEQYSLNEIVNEYNGNTYHTNYHDLLDVREEERLKARQSWQTIENIKELKEGYLSQVIHKITQLMVRYHAIVVLEDLSKGFMRSRQKVEKQVYQKFEKMLIDKLNYLVDKKTDVSTPGGLLNAYQLTCKSDSSQKLGKQSGFLFYIPAWNTSKIDPVTGFVNLLDTHSLNSKEKIKAFFSKFDAIRYNKDKKWFEFNLDYDKFGKKAEDTRTKWTLCTRGMRIDTFRNKEKNSQWDNQEVDLTTEMKSLLEHYYIDIHGNLKDAISAQTDKAFFTGLLHILKLTLQMRNSITGTETDYLVSPVADENGIFYDSRSCGNQLPENADANGAYNIARKGLMLIEQIKNAEDLNNVKFDISNKAWLNFAQQKPYKNG

SEQ ID NO: 47 - protein, 1142 aa, Eubacterium rectale
MFSAKLISDILPEFVIHNNNYSASEKEEKTQVIKLFSRFATSFKDYFKNRANCFSANDISSSSCHRIVNDNAEIFFSNALVYRRIVKNLSNDDINKISGDMKDSLKEMSLEEIYSYEKYGEFITQEGISFYNDICGKVNLFMNLYCQKNKENKNLYKLRKLHKQILCIADTSYEVPYKFESDEEVYQSVNGFLDNISSKHIVERLRKIGENYNGYNLDKIYIVSKFYESVSQKTYRDWETINTALEIHYNNILPGNGKSKADKVKKAVKNDLQKSITEINELVSNYKLCPDDNIKAETYIHEISHILNNFEAQELKYNPEIHLVESELKASELKNVLDVIMNAFHWCSVFMTEELVDKDNNFYAELEEIYDEIYPVISLYNLVRNYVTQKPYSTKKIKLNFGIPTLADGWSKSKEYSNNAIILMRDNLYYLGIFNAKNKPDKKIIEGNTSENKGDYKKMIYNLLPGPNKMIPKVFLSSKTGVETYKPSAYILEGYKQNKHLKSSKDFDITFCHDLIDYFKNCIAIHPEWKNFGFDFSDTSTYEDISGFYREVELQGYKIDWTYISEKDIDLLQEKGQLYLFQIYNKDFSKKSSGNDNLHTMYLKNLFSEENLKDIVLKLNGEAEIFFRKSSIKNPIIHKKGSILVNRTYEAEEKDQFGNIQIVRKTIPENIYQELYKYFNDKSDKELSDEAAKLKNVVGHHEAATNIVKDYRYTYDKYFLHMPITINFKANKTSFINDRILQYIAKEKDLHVIGIDRGERNLIYVSVIDTCGNIVEQKSFNIVNGYDYQIKLKQQEGARQIARKEWKEIGKIKEIKEGYLSLVIHEISKMVIKYNAIIAMEDLSYGFKKGRFKVERQVYQKFETMLINKLNYLVFKDISITENGGLLKGYQLTYIPDKLKNVGHQCGCIFYVPAAYTSKIDPTTGFVNIFKFKDLTVDAKREFIKKFDSIRYDSDKNLFCFTFDYNNFITQNTVMSKSSWSVYTYGVRIKRRFVNGRFSNESDTIDITKDMEKTLEMTDINWRDGHDLRQDIIDYEIVQHIFEIFKLTVQMRNSLSELEDRDYDRLISPVLNENNIFYDSAKAGDALPKDADANGAYCIALKGLYEIKQITENWKEDGKFSRDKLKISNKDWFDFIQNKRYL

SEQ ID NO: 48 - protein, 1259 aa, Clostridium sp.
MNYKTGLEDFIGKESLSKTLRNALIPTESTKIHMEEMGVIRDDELRAEKQQELKEIMDDYYRAFIEEKLGQIQGIQWNSLFQKMEETMEDISVRKDLDKIQNEKRKEICCYFTSDKRFKDLFNAKLITDILPNFIKDNKEYTEEEKAEKEQTRVLFQRFATAFTNYFNQRRNNFSEDNISTAISFRIVNENSEIHLQNMRAFQRIEQQYPEEVCGMEEEYKDMLQEWQMKHIYLVDFYDRVLTQPGIEYYNGICGKINEHMNQFCQKNRINKNDFRMKKLHKQILCKKSSYYEIPFRFESDQEVYDALNEFIKTMKEKEIICRCVHLGQKCDDYDLGKIYISSNKYEQISNALYGSWDTIRKCIKEEYMDALPGKGEKKEEKAEAAAKKEEYRSIADIDKIISLYGSEMDRTISAKKCITEICDMAGQISTDPLVCNSDIKLLQNKEKTTEIKTILDSFLHVYQWGQTFIVSDIIEKDSYFYSELEDVLEDFEGITTLYNHVRSYVTQKPYSTVKFKLHFGSPTLANGWSQSKEYDNNAILLMRDQKFYLGIFNVRNKPDKQIIKGHEKEEKGDYKKMIYNLLPGPSKMLPKVFITSRSGQETYKPSKHILDGYNEKRHIKSSPKFDLGYCWDLIDYYKECIHKHPDWKNYDFHFSDTKDYEDISGFYREVEMQGYQIKWTYISADEIQKLDEKGQIFLFQIYNKDFSVHSTGKDNLHTMYLKNLFSEENLKDIVLKLNGEAELFFRKASIKTPVVHKKGSVLVNRSYTQTVGDKEIRVSIPEEYYTEIYNYLNHIGRGKLSTEAQRYLEERKIKSFTATKDIVKNYRYCCDHYFLHLPITINFKAKSDIAVNERTLAYIAKKEDIHIIGIDRGERNLLYISVVDVHGNIREQRSFNIVNGYDYQQKLKDREKSRDAARKNWEEIEKIKELKEGYLSMVIHYIAQLVVKYNAVVAMEDLNYGFKTGRFKVERQVYQKFETMLIEKLHYLVFKDREVCEEGGVLRGYQLTYIPESLKKVGKQCGFIFYVPAGYTSKIDPTTGFVNLFSFKNLTNRESRQDFVGKFDEIRYDRDKKMFEFSFDYNNYIKKGTMLASTKWKVYTNGTRLKRIVVNGKYTSQSMEVELTDAMEKMLQRAGIEYHDGKDLKGQIVEKGIEAEIIDIFRLTVQMRNSRSESEDREYDRLISPVLNDKGEFFDTATADKTLPQDADANGAYCIALKGLYEVKQIKENWKENEQFPRNKLVQDNKTWFDFMQKKRYL

SEQ ID NO: 49 - protein, 1108 aa, Bacillus hisashii; identical to SEQ ID NO: 42

SEQ ID NO: 50 - protein, 1465 aa, Thermomonas hydrothermalis
MSEKTTQRAYTLRLNRASGECAVCQNNSCDCWHDALWATHKAVNRGAKAFGDWLLTLRGGLCHTLVEMEVPAKGNNPPQRPTDQERRDRRVLLALSWLSVEDEHGAPKEFIVATGRDSADDRAKKVEEKLREILEKRDFQEHEIDAWLQDCGPSLKAHIREDAVWVNRRALFDAAVERIKTLTWEEAWDFLEPFFGTQYFAGIGDGKDKDDAEGPARQGEKAKDLVQKAGQWLSARFGIGTGADFMSMAEAYEKIAKWASQAQNGDNGKATIEKLACALRPSEPPTLDTVLKCISGPGHKSATREYLKTLDKKSTVTQEDLNQLRKLADEDARNCRKKVGKKGKKPWADEVLKDVENSCELTYLQDNSPARHREFSVMLDHAARRVSMAHSWIKKAEQRRRQFESDAQKLKNLQERAPSAVEWLDRFCESRSMTTGANTGSGYRIRKRAIEGWSYVVQAWAEASCDTEDKRIAAARKVQADPEIEKFGDIQLFEALAADEAICVWRDQEGTQNPSILIDYVTGKTAEHNQKRFKVPAYRHPDELRHPVFCDFGNSRWSIQFAIHKEIRDRDKGAKQDTRQLQNRHGLKMRLWNGRSMTDVNLHWSSKRLTADLALDQNPNPNPTEVTRADRLGRAASSAFDHVKIKNVFNEKEWNGRLQAPRAELDRIAKLEEQGKTEQAEKLRKRLRWYVSFSPCLSPSGPFIVYAGQHNIQPKRSGQYAPHAQANKGRARLAQLILSRLPDLRILSVDLGHRFAAACAVWETLSSDAFRREIQGLNVLAGGSGEGDLFLHVEMTGDDGKRRTVVYRRIGPDQLLDNTPHPAPWARLDRQFLIKLQGEDEGVREASNEELWTVHKLEVEVGRTVPLIDRMVRSGFGKTEKQKERLKKLRELGWISAMPNEPSAETDEKEGEIRSISRSVDELMSSALGTLRLALKRHGNRARIAFAMTADYKPMPGGQKYYFHEAKEASKNDDETKRRDNQIEFLQDALSLWHDLFSSPDWEDNEAKKLWQNHIATLPNYQTPEEISAELKRVERNKKRKENRDKLRTAAKALAENDQLRQHLHDTWKERWESDDQQWKERLRSLKDWIFPRGKAEDNPSIRHVGGLSITRINTISGLYQILKAFKMRPEPDDLRKNIPQKGDDELENFNRRLLEARDRLREQRVKQLASRIIEAALGVGRIKIPKNGKLPKRPRTTVDTPCHAVVIESLKTYRPDDLRTRRENRQLMQWSSAKVRKYLKEGCELYGLHFLEVPANYTSRQCSRTGLPGIRCDDVPTGDFLKAPWWRRAINTAREKNGGDAKDRFLVDLYDHLNNLQSKGEALPATVRVPRQGGNLFIAGAQLDDTNKERRAIQADLNAAANIGLRALLDPDWRGRWWYVPCKDGTSEPALDRIEGSTAFNDVRSLPTGDNSSRRAPREIENLWRDPSGDSLESGTWSPTRAYWDTVQSRVIELLRRHAGLPTS

SEQ ID NO: 51 - protein, 1090 aa, Laceyella sacchari
MSIRSFKLKLKTKSGVNAEQLRRGLWRTHQLINDGIAYYMNWLVLLRQEDLFIRNKETNEIEKRSKEEIQAVLLERVHKQQQRNQWSGEVDEQTLLQALRQLYEEIVPSVIGKSGNASLKARFFLGPLVDPNNKTTKDVSKSGPTPKWKKMKDAGDPNWVQEYEKYMAERQTLVRLEEMGLIPLFPMYTDEVGDIHWLPQASGYTRTWDRDMFQQAIERLLSWESWNRRVRERRAQFEKKTHDFASRFSESDVQWMNKLREYEAQQEKSLEENAFAPNEPYALTKKALRGWERVYHSWMRLDSAASEEAYWQEVATCQTAMRGEFGDPAIYQFLAQKENHDIWRGYPERVIDFAELNHLQRELRRAKEDATFTLPDSVDHPLWVRYEAPGGTNIHGYDLVQDTKRNLTLILDKFILPDENGSWHEVKKVPFSLAKSKQFHRQVWLQEEQKQKKREVVFYDYSTNLPHLGTLAGAKLQWDRNFLNKRTQQQIEETGEIGKVFFNISVDVRPAVEVKNGRLQNGLGKALTVLTHPDGTKIVTGWKAEQLEKWVGESGRVSSLGLDSLSEGLRVMSIDLGQRTSATVSVFEITKEAPDNPYKFFYQLEGTEMFAVHQRSFLLALPGENPPQKIKQMREIRWKERNRIKQQVDQLSAILRLHKKVNEDERIQAIDKLLQKVASWQLNEEIATAWNQALSQLYSKAKENDLQWNQAIKNAHHQLEPVVGKQISLWRKDLSTGRQGIAGLSLWSIEELEATKKLLTRWSKRSREPGVVKRIERFETFAKQIQHHINQVKENRLKQLANLIVMTALGYKYDQEQKKWIEVYPACQVVLFENLRSYRFSFERSRRENKKLMEWSHRSIPKLVQMQGELFGLQVADVYAAYSSRYHGRTGAPGIRCHALTEADLRNETNIIHELIEAGFIKEEHRPYLQQGDLVPWSGGELFATLQKPYDNPRILTLHADINAAQNIQKRFWHPSMWFRVNCESVMEGEIVTYVPKNKTVHKKQGKTFRFVKVEGSDVYEWAKWSKNRNKNTFSSITERKPPSSMILFRDPSGTFFKEQEWVEQKTFWGKVQSMIQAYMKKTIVQRMEE

SEQ ID NO: 52 - protein, 1194 aa, Dsulfonatronum thiodismutans
MVLGRKDDTAELRRALWTTHEHVNLAVAEVERVLLRCRGRSYWTLDRRGDPVHVPESQVAEDALAMAREAQRRNGWPVVGEDEEILLALRYLYEQIVPSCLLDDLGKPLKGDAQKIGTNYAGPLFDSDTCRRDEGKDVACCGPFHEVAGKYLGALPEWATPISKQEFDGKDASHLRFKATGGDDAFFRVSIEKANAWYEDPANQDALKNKAYNKDDWKKEKDKGISSWAVKYIQKQLQLGQDPRTEVRRKLWLELGLLPLFIPVFDKTMVGNLWNRLAVRLALAHLLSWESWNHRAVQDQALARAKRDELAALFLGMEDGFAGLREYELRRNESIKQHAFEPVDRPYVVSGRALRSWTRVREEWLRHGDTQESRKNICNRLQDRLRGKFGDPDVFHWLAEDGQEALWKERDCVTSFSLLNDADGLLEKRKGYALMTFADARLHPRWAMYEAPGGSNLRTYQIRKTENGLWADVVLLSPRNESAAVEEKTFNVRLAPSGQLSNVSFDQIQKGSKMVGRCRYQSANQQFEGLLGGAEILFDRKRIANEQHGATDLASKPGHVWFKLTLDVRPQAPQGWLDGKGRPALPPEAKHFKTALSNKSKFADQVRPGLRVLSVDLGVRSFAACSVFELVRGGPDQGTYFPAADGRTVDDPEKLWAKHERSFKITLPGENPSRKEEIARRAAMEELRSLNGDIRRLKAILRLSVLQEDDPRTEHLRLFMEAIVDDPAKSALNAELFKGFGDDRFRSTPDLWKQHCHFFHDKAEKVVAERFSRWRTETRPKSSSWQDWRERRGYAGGKSYWAVTYLEAVRGLILRWNMRGRTYGEVNRQDKKQFGTVASALLHHINQLKEDRIKTGADMIIQAARGFVPRKNGAGWVQVHEPCRLILFEDLARYRFRTDRSRRENSRLMRWSHREIVNEVGMQGELYGLHVDTTEAGFSSRYLASSGAPGVRCRHLVEEDFHDGLPGMHLVGELDWLLPKDKDRTANEARRLLGGMVRPGMLVPWDGGELFATLNAASQLHVIHADINAAQNLQRRFWGRCGEAIRIVCNQLSVDGSTRYEMAKAPKARLLGALQQLKNGDAPFHLTSIPNSQKPENSYVMTPTNAGKKYRAGPGEKSSGEEDELALDIVEQAEELAQGRKTFFRDPSGVFFAPDRWLPSEIYWSRIRRRIWQVTLERNSSGRQERAEMDEMPY

SEQ ID NO: 53 - protein, 1368 aa, Artificial Sequence
  Synthetic
MDKKYSIGLDIGTNSVGWAVITDEYKVPSKKFKVLGNTDRHSIKKNLIGALLFDSGETAEATRLKRTARRRYTRRKNRICYLQEIFSNEMAKVDDSFFHRLEESFLVEEDKKHERHPIFGNIVDEVAYHEKYPTIYHLRKKLVDSTDKADLRLIYLALAHMIKFRGHFLIEGDLNPDNSDVDKLFIQLVQTYNQLFEENPINASGVDAKAILSARLSKSRRLENLIAQLPGEKKNGLFGNLIALSLGLTPNFKSNFDLAEDAKLQLSKDTYDDDLDNLLAQIGDQYADLFLAAKNLSDAILLSDILRVNTEITKAPLSASMVKRYDEHHQDLTLLKALVRQQLPEKYKEIFFDQSKNGYAGYIDGGASQEEFYKFIKPILEKMDGTEELLVKLNREDLLRKQRTFDNGIIPHQIHLGELHAILRRQGDFYPFLKDNREKIEKILTFRIPYYVGPLARGNSRFAWMTRKSEETITPWNFEEVVDKGASAQSFIERMTNFDKNLPNEKVLPKHSLLYEYFTVYNELTKVKYVTEGMRKPAFLSGEQKKAIVDLLFKTNRKVTVKQLKEDYFKKIECFDSVEISGVEDRFNASLGTYHDLLKIIKDKDFLDNEENEDILEDIVLTLTLFEDREMIEERLKTYAHLFDDKVMKQLKRLRYTGWGRLSRKLINGIRDKQSGKTILDFLKSDGFANRNFMQLIHDDSLTFKEDIQKAQVSGQGDSLHEHIANLAGSPAIKKGILQTVKVVDELVKVMGGHKPENIVIEMARENQTTQKGQKNSRERMKRIEEGIKELGSQILKEHPVENTQLQNEKLYLYYLQNGRDMYVDQELDINRLSDYDVDHIVPQSFLKDDSIDNKVLTRSDKNRGKSDNVPSEEVVKKMKNYWRQLLNAKLITQRKFDNLTKAERGGLSELDKAGFIKRQLVETRQITKHVAQILDSRMNTKYDENDKLIREVKVITLKSKLVSDFRKDFQFYKVREINNYHHAHDAYLNAVVGTALIKKYPKLESEFVYGDYKVYDVRKMIAKSEQEIGKATAKYFFYSNIMNFFKTEITLANGEIRKRPLIETNGETGEIVWDKGRDFATVRKVLSMPQVNIVKKTEVQTGGFSKESILPKGNSDKLIARKKDWDPKKYGGFNSPTAAYSVLVVAKVEKGKSKKLKSVKELLGITIMERSSFEKNPIGFLEAKGYKEVKKDLIIKLPKYSLFELENGRKRMLASAGVLHKGNELALPSKYVNFLYLASHYEKLKGSPEDNEQKQLFVEQHKHYLDEIIEQISEFSKRVILADANLDKVLSAYNKHRDKPIREQAENIIHLFTLTNLGVPAAFKYFDTTIDKKRYTSTKEVLDATLIHQSITGLYETRIDLSQLGGD

SEQ ID NO: 54 - protein, 1368 aa, Artificial Sequence
  Synthetic
MDKKYSIGLDIGTNSVGWAVITDEYKVPSKKFKVLGNTDRHSIKKNLIGALLFDSGETAEATRLKRTARRRYTRRKNRICYLQEIFSNEMAKVDDSFFHRLEESFLVEEDKKHERHPIFGNIVDEVAYHEKYPTIYHLRKKLVDSTDKADLRLIYLALAHMIKFRGHFLIEGDLNPDNSDVDKLFIQLVQTYNQLFEENPINASGVDAKAILSARLSKSRRLENLIAQLPGEKKNGLFGNLIALSLGLTPNFKSNFDLAEDAKLQLSKDTYDDDLDNLLAQIGDQYADLFLAAKNLSDAILLSDILRVNTEITKAPLSASMVKRYDEHHQDLTLLKALVRQQLPEKYKEIFFDQSKNGYAGYIDGGASQEEFYKFIKPILEKMDGTEELLVKLNREDLLRKQRTFDNGIIPHQIHLGELHAILRRQGDFYPFLKDNREKIEKILTFRIPYYVGPLARGNSRFAWMTRKSEETITPWNFEEVVDKGASAQSFIERMTNFDKNLPNEKVLPKHSLLYEYFTVYNELTKVKYVTEGMRKPAFLSGEQKKAIVDLLFKTNRKVTVKQLKEDYFKKIECFDSVEISGVEDRFNASLGTYHDLLKIIKDKDFLDNEENEDILEDIVLTLTLFEDREMIEERLKTYAHLFDDKVMKQLKRLRYTGWGRLSRKLINGIRDKQSGKTILDFLKSDGFANRNFMQLIHDDSLTFKEDIQKAQVSGQGDSLHEHIANLAGSPAIKKGILQTVKVVDELVKVMGGHKPENIVIEMARENQTTQKGQKNSRERMKRIEEGIKELGSQILKEHPVENTQLQNEKLYLYYLQNGRDMYVDQELDINRLSDYDVDHIVPQSFLKDDSIDNKVLTRSDKNRGKSDNVPSEEVVKKMKNYWRQLLNAKLITQRKFDNLTKAERGGLSELDKAGFIKRQLVETRQITKHVAQILDSRMNTKYDENDKLIREVKVITLKSKLVSDFRKDFQFYKVREINNYHHAHDAYLNAVVGTALIKKYPKLESEFVYGDYKVYDVRKMIAKSEQEIGKATAKYFFYSNIMNFFKTEITLANGEIRKRPLIETNGETGEIVWDKGRDFATVRKVLSMPQVNIVKKTEVQTGGFSKESILPKGNSDKLIARKKDWDPKKYGGFNSPTVAYSVLVVAKVEKGKSKKLKSVKELLGITIMERSSFEKNPIDFLEAKGYKEVKKDLIIKLPKYSLFELENGRKRMLASAGVLQKGNELALPSKYVNFLYLASHYEKLKGSPEDNEQKQLFVEQHKHYLDEIIEQISEFSKRVILADANLDKVLSAYNKHRDKPIREQAENIIHLFTLTNLGAPAAFKYFDTTINRKQYNTTKEVLDATLIRQSITGLYETRIDLSQLGGD

SEQ ID NO: 55 - protein, 1368 aa, Artificial Sequence
  Synthetic
MDKKYSIGLDIGTNSVGWAVITDEYKVPSKKFKVLGNTDRHSIKKNLIGALLFDSGETAEATRLKRTARRRYTRRKNRICYLQEIFSNEMAKVDDSFFHRLEESFLVEEDKKHERHPIFGNIVDEVAYHEKYPTIYHLRKKLVDSTDKADLRLIYLALAHMIKFRGHFLIEGDLNPDNSDVDKLFIQLVQTYNQLFEENPINASGVDAKAILSARLSKSRRLENLIAQLPGEKKNGLFGNLIALSLGLTPNFKSNFDLAEDAKLQLSKDTYDDDLDNLLAQIGDQYADLFLAAKNLSDAILLSDILRVNTEITKAPLSASMVKRYDEHHQDLTLLKALVRQQLPEKYKEIFFDQSKNGYAGYIDGGASQEEFYKFIKPILEKMDGTEELLVKLNREDLLRKQRTFDNGIIPHQIHLGELHAILRRQGDFYPFLKDNREKIEKILTFRIPYYVGPLARGNSRFAWMTRKSEETITPWNFEEVVDKGASAQSFIERMTNFDKNLPNEKVLPKHSLLYEYFTVYNELTKVKYVTEGMRKPAFLSGEQKKAIVDLLFKTNRKVTVKQLKEDYFKKIECFDSVEISGVEDRFNASLGTYHDLLKIIKDKDFLDNEENEDILEDIVLTLTLFEDREMIEERLKTYAHLFDDKVMKQLKRLRYTGWGRLSRKLINGIRDKQSGKTILDFLKSDGFANRNFMQLIHDDSLTFKEDIQKAQVSGQGDSLHEHIANLAGSPAIKKGILQTVKVVDELVKVMGGHKPENIVIEMARENQTTQKGQKNSRERMKRIEEGIKELGSQILKEHPVENTQLQNEKLYLYYLQNGRDMYVDQELDINRLSDYDVDHIVPQSFLKDDSIDNKVLTRSDKNRGKSDNVPSEEVVKKMKNYWRQLLNAKLITQRKFDNLTKAERGGLSELDKAGFIKRQLVETRQITKHVAQILDSRMNTKYDENDKLIREVKVITLKSKLVSDFRKDFQFYKVREINNYHHAHDAYLNAVVGTALIKKYPKLESEFVYGDYKVYDVRKMIAKSEQEIGKATAKYFFYSNIMNFFKTEITLANGEIRKRPLIETNGETGEIVWDKGRDFATVRKVLSMPQVNIVKKTEVQTGGFSKESILPKGNSDKLIARKKDWDPKKYGGFNSPTVAYSVLVVAKVEKGKSKKLKSVKELLGITIMERSSFEKNPIGFLEAKGYKEVKKDLIIKLPKYSLFELENGRKRMLASASVLHKGNELALPSKYVNFLYLASHYEKLKGSSEDNKQKQLFVEQHKHYLDEIIEQISEFSKRVILADANLDKVLSAYNKHRDKPIREQAENIIHLFTLTNLGASAAFKYFDTTIGRKLYTSTKEVLDATLIHQSITGLYETRIDLSQLGGD

SEQ ID NO: 56 - protein, 1359 aa, Artificial Sequence
  Synthetic
DKKYSIGLDIGTNSVGWAVITDEYKVPSKKFKVLGNTDRHSIKKNLIGALLFDSGETAEATRLKRTARRRYTRRKNRICYLQEIFSNEMAKVDDSFFHRLEESFLVEEDKKHERHPIFGNIVDEVAYHEKYPTIYHLRKKLVDSTDKADLRLIYLALAHMIKFRGHFLIEGDLNPDNSDVDKLFIQLVQTYNQLFEENPINASGVDAKAILSARLSKSRKLENLIAQLPGEKKNGLFGNLIALSLGLTPNFKSNFDLAEDAKLQLSKDTYDDDLDNLLAQIGDQYADLFLAAKNLSDAILLSDILRVNTEITKAPLSASMIKRYDEHHQDLTLLKALVRQQLPEKYKEIFFDQSKNGYAGYIDGGASQEEFYKFIKPILEKMDGTEELLVKLKREDLLRKQRTFDNGSIPHQIHLGELHAILRRQEDFYPFLKDNREKIEKILTFRIPYYVGPLARGNSRFAWMTRKSEETITPWNFEEVVDKGASAQSFIERMTNFDKNLPNEKVLPKHSLLYEYFTVYNELTKVKYVTEGMRKPAFLSGEQKKAIVDLLFKTNRKVTVKQLKEDYFKKIECFDSVEISGVEDRFNASLGTYHDLLKIIKDKDFLDNEENEDILEDIVLTLTLFEDREMIEERLKTYAHLFDDKVMKQLKRRRYTGWGRLSRKLINGIRDKQSGKTILDFLKSDGFANRNFMQLIHDDSLTFKEDIQKAQVSGQGDSLHEHIANLAGSPAIKKGILQTVKVVDELVKVMGRHKPENIVIEMARENQTTQKGQKNSRERMKRIEEGIKELGSQILKEHPVENTQLQNEKLYLYYLQNGRDMYVDQELDINRLSDYDVDHIVPQSFLKDDSIDNKVLTRSDKNRGKSDNVPSEEVVKKMKNYWRQLLNAKLITQRKFDNLTKAERGGLSELDKAGFIKRQLVETRQITKHVAQILDSRMNTKYDENDKLIREVKVITLKSKLVSDFRKDFQFYKVREINNYHHAHDAYLNAVVGTALIKKYPKLESEFVYGDYKVYDVRKMIAKSEQEIGKATAKYFFYSNIMNFFKTEITLANGEIRKRPLIETNGETGEIVWDKGRDFATVRKVLSMPQVNIVKKTEIQTVGQNGGLFDDNPKSPLEVTPSKLVPLKKELNPKKYGGYQKPTTAYPVLLITDTKQLIPISVMNKKQFEQNPVKFLRDRGYQQVGKNDFIKLPKYTLVDIGDGIKRLWASSKEIHKGNQLVVSKKSQILLYHAHHLDSDLSNDYLQNHNQQFDVLFNEIISFSKKCKLGKEHIQKIENVYSNKKNSASIEELAESFIKLLGFTQLGATSPFNFLGVKLNQKQYKGKKDYILPCTEGTLIRQSITGLYETRVDLSKIGED

SEQ ID NO: 57 - protein, 357 aa, Artificial Sequence
  Synthetic
DYKVYDVRKMIAKSEQEIGKATAKYFFYSNIMNFFKTEITLANGEIRKRPLIETNGETGEIVWDKGRDFATVRKVLSMPQVNIVKKTEVQTGGFSKESILPKRNSDKLIARKKDWDPKKYGGFDSPTVAYSVLVVAKVEKGKSKKLKSVKELLGITIMERSSFEKNPIDFLEAKGYKEVKKDLIIKLPKYSLFELENGRKRMLASAGELQKGNELALPSKYVNFLYLASHYEKLKGSPEDNEQKQLFVEQHKHYLDEIIEQISEFSKRVILADANLDKVLSAYNKHRDKPIREQAENIIHLFTLTNLGAPAAFKYFDTTIDRKRYTSTKEVLDATLIHQSITGLYETRIDLSQLGGD

SEQ ID NO: 58 - DNA, 22 bp, S. pyogenes
  misc_feature (9)..(20): n is a, c, g, or t
mmmmmmmmnnnnnnnnnnnngg

SEQ ID NO: 59 - DNA, 14 bp, S. pyogenes
  misc_feature (1)..(12): n is a, c, g, or t
nnnnnnnnnnnngg

SEQ ID NO: 60 - DNA, 22 bp, S. pyogenes
  misc_feature (10)..(20): n is a, c, g, or t
mmmmmmmmmnnnnnnnnnnngg

SEQ ID NO: 61 - DNA, 13 bp, S. pyogenes
  misc_feature (1)..(11): n is a, c, g, or t
nnnnnnnnnnngg

SEQ ID NO: 62 - DNA, 25 bp, S. hermophiles
  misc_feature (9)..(20): n is a, c, g, or t
mmmmmmmmnnnnnnnnnnnnagaaw

SEQ ID NO: 63 - DNA, 17 bp, S. hermophiles
  misc_feature (1)..(12): n is a, c, g, or t
nnnnnnnnnnnnagaaw

SEQ ID NO: 64 - DNA, 25 bp, S. hermophiles
  misc_feature (10)..(20): n is a, c, g, or t
mmmmmmmmmnnnnnnnnnnnagaaw

SEQ ID NO: 65 - DNA, 16 bp, S. hermophiles
  misc_feature (1)..(11): n is a, c, g, or t
nnnnnnnnnnnagaaw

SEQ ID NO: 66 - DNA, 23 bp, S. pyogenes
  misc_feature (9)..(20): n is a, c, g, or t
mmmmmmmmnnnnnnnnnnnnggg

SEQ ID NO: 67 - DNA, 15 bp, S. pyogenes
  misc_feature (1)..(12): n is a, c, g, or t
nnnnnnnnnnnnggg

SEQ ID NO: 68 - DNA, 23 bp, S. pyogenes
  misc_feature (10)..(20): n is a, c, g, or t
mmmmmmmmmnnnnnnnnnnnggg

SEQ ID NO: 69 - DNA, 14 bp, S. pyogenes
  misc_feature (1)..(11): n is a, c, g, or t
nnnnnnnnnnnggg

SEQ ID NO: 70 - protein, 341 aa, Artificial Sequence
  Synthetic
EIGKATAKYFFYSNIMNFFKTEITLANGEIRKRPLIETNGETGEIVWDKGRDFATVRKVLSMPQVNIVKKTEVQTGGFSKESILPKRNSDKLIARKKDWDPKKYGGFDSPTVAYSVLVVAKVEKGKSKKLKSVKELLGITIMERSSFEKNPIDFLEAKGYKEVKKDLIIKLPKYSLFELENGRKRMLASAGELQKGNELALPSKYVNFLYLASHYEKLKGSPEDNEQKQLFVEQHKHYLDEIIEQISEFSKRVILADANLDKVLSAYNKHRDKPIREQAENIIHLFTLTNLGAPAAFKYFDTTIDRKRYTSTKEVLDATLIHQSITGLYETRIDLSQLGGD

SEQ ID NO: 71 - DNA, 125 bp, Artificial Sequence
  Synthetic
  misc_feature (1)..(8): n is a, c, g, or t
nnnnnnnngtttttgtactctcaagatttagaaataaatcttgcagaagctacaaagataaggcttcatgccgaaatcaacaccctgtcattttatggcagggtgttttcgttatttaatttttt

SEQ ID NO: 72 - DNA, 121 bp, Artificial Sequence
  Synthetic
  misc_feature (1)..(18): n is a, c, g, or t
nnnnnnnnnnnnnnnnnngtttttgtactctcagaaatgcagaagctacaaagataaggcttcatgccgaaatcaacaccctgtcattttatggcagggtgttttcgttatttaatttttt

SEQ ID NO: 73 - DNA, 109 bp, Artificial Sequence
  Synthetic
  misc_feature (1)..(20): n is a, c, g, or t
nnnnnnnnnnnnnnnnnnnngtttttgtactctcagaaatgcagaagctacaaagataaggcttcatgccgaaatcaacaccctgtcattttatggcagggtgtttttt

SEQ ID NO: 74 - DNA, 102 bp, Artificial Sequence
  Synthetic
  misc_feature (1)..(20): n is a, c, g, or t
nnnnnnnnnnnnnnnnnnnngttttagagctagaaatagcaagttaaaataaggctagtccgttatcaacttgaaaaagtggcaccgagtcggtgctttttt

SEQ ID NO: 75 - DNA, 88 bp, Artificial Sequence
  Synthetic
  misc_feature (1)..(20): n is a, c, g, or t
nnnnnnnnnnnnnnnnnnnngttttagagctagaaatagcaagttaaaataaggctagtccgttatcaacttgaaaaagtgttttttt

SEQ ID NO: 76 - DNA, 76 bp, Artificial Sequence
  Synthetic
  misc_feature (1)..(20): n is a, c, g, or t
nnnnnnnnnnnnnnnnnnnngttttagagctagaaatagcaagttaaaataaggctagtccgttatcatttttttt

SEQ ID NO: 77 - protein, 328 aa, Artificial Sequence
  Synthetic
NIMNFFKTEITLANGEIRKRPLIETNGETGEIVWDKGRDFATVRKVLSMPQVNIVKKTEVQTGGFSKESILPKRNSDKLIARKKDWDPKKYGGFDSPTVAYSVLVVAKVEKGKSKKLKSVKELLGITIMERSSFEKNPIDFLEAKGYKEVKKDLIIKLPKYSLFELENGRKRMLASAGELQKGNELALPSKYVNFLYLASHYEKLKGSPEDNEQKQLFVEQHKHYLDEIIEQISEFSKRVILADANLDKVLSAYNKHRDKPIREQAENIIHLFTLTNLGAPAAFKYFDTTIDRKRYTSTKEVLDATLIHQSITGLYETRIDLSQLGGD

SEQ ID NO: 78 - protein, 120 aa, Artificial Sequence
  Synthetic
PEDNEQKQLFVEQHKHYLDEIIEQISEFSKRVILADANLDKVLSAYNKHRDKPIREQAENIIHLFTLTNLGAPAAFKYFDTTIDRKRYTSTKEVLDATLIHQSITGLYETRIDLSQLGGD

SEQ ID NO: 79 - protein, 69 aa, Artificial Sequence
  Synthetic
KPIREQAENIIHLFTLTNLGAPAAFKYFDTTIDRKRYTSTKEVLDATLIHQSITGLYETRIDLSQLGGD

SEQ ID NO: 80 - DNA, 57 bp, Artificial Sequence
  Synthetic
gagagcagaaaagcaagaaaaaaggcagccgacaacgaaaaagggcaccgagcgggc

SEQ ID NO: 81 - DNA, 58 bp, Artificial Sequence
  Synthetic
gagaccgaagaaaaacagaacacaaaacaaggcaaaagccggaccgcaacgggcgaga

SEQ ID NO: 82 - protein, 1367 aa, Fusobacterium nucleatum
MKKQKFSDYYLGFDIGTNSVGWCVTDLDYNVLRFNKKDMWGSRLFEEAKTAAERRVQRNSRRRLKRRKWRLNLLEEIFSNEILKIDSNFFRRLKESSLWLEDKSSKEKFTLFNDDNYKDYDFYKQYPTIFHLRNELIKNPEKKDIRLVYLAIHSIFKSRGHFLFEGQNLKEIKNFETLYNNLIAFLEDNGINKIIDKNNIEKLEKIVCDSKKGLKDKEKEFKEIFNSDKQLVAIFKLSVGSSVSLNDLFDTDEYKKGEVEKEKISFREQIYEDDKPIYYSILGEKIELLDIAKTFYDFMVLNNILADSQYISEAKVKLYEEHKKDLKNLKYIIRKYNKGNYDKLFKDKNENNYSAYIGLNKEKSKKEVIEKSRLKIDDLIKNIKGYLPKVEEIEEKDKAIFNKILNKIELKTILPKQRISDNGTLPYQIHEAELEKILENQSKYYDFLNYEENGIITKDKLLMTFKFRIPYYVGPLNSYHKDKGGNSWIVRKEEGKILPWNFEQKVDIEKSAEEFIKRMTNKCTYLNGEDVIPKDTFLYSEYVILNELNKVQVNDEFLNEENKRKIIDELFKENKKVSEKKFKEYLLVKQIVDGTIELKGVKDSFNSNYISYIRFKDIFGEKLNLDIYKEISEKSILWKCLYGDDKKIFEKKIKNEYGDILTKDEIKKINTFKFNNWGRLSEKLLTGIEFINLETGECYSSVMDALRRTNYNLMELLSSKFTLQESINNENKEMNEASYRDLIEESYVSPSLKRAIFQTLKIYEEIRKITGRVPKKVFIEMARGGDESMKNKKIPARQEQLKKLYDSCGNDIANFSIDIKEMKNSLISYDNNSLRQKKLYLYYLQFGKCMYTGREIDLDRLLQNNDTYDIDHIYPRSKVIKDDSFDNLVLVLKNENAEKSNEYPVKKEIQEKMKSFWRFLKEKNFISDEKYKRLTGKDDFELRGFMARQLVNVRQTTKEVGKILQQIEPEIKIVYSKAEIASSFREMFDFIKVRELNDTHHAKDAYLNIVAGNVYNTKFTEKPYRYLQEIKENYDVKKIYNYDIKNAWDKENSLEIVKKNMEKNTVNITRFIKEKKGQLFDLNPIKKGETSNEIISIKPKVYNGKDDKLNEKYGYYKSLNPAYFLYVEHKEKNKRIKSFERVNLVDVNNIKDEKSLVKYLIENKKLVEPRVIKKVYKRQVILINDYPYSIVTLDSNKLMDFENLKPLFLENKYEKILKNVIKFLEDNQGKSEENYKFIYLKKKDRYEKNETLESVKDRYNLEFNEMYDKFLEKLDSKDYKNYMNNKKYQELLDVKEKFIKLNLFDKAFTLKSFLDLFNRKTMADFSKVGLTKYLGKIQKISSNVLSKNELYLLEESVTGLFVKKIKL

SEQ ID NO: 83-207 - skipped (125 entries)

SEQ ID NO: 208 - DNA, 22 bp, Artificial Sequence
  Synthetic
aatgtcaaatccgtggcgtgac

SEQ ID NO: 209 - DNA, 24 bp, Artificial Sequence
  Synthetic
ttcacccggatacatctcgtcttc

SEQ ID NO: 210 - DNA, 22 bp, Artificial Sequence
  Synthetic
cggaaggcaccgtaaaagacat

SEQ ID NO: 211 - DNA, 21 bp, Artificial Sequence
  Synthetic
cgtgtagagcgtgcggtgaaa

SEQ ID NO: 212 - DNA, 31 bp, Artificial Synthetic
  Synthetic
attattattatttctatttatttatttattt

SEQ ID NO: 213 - protein, 1368 aa, Streptococcus pyogenes [sequence omitted]

SEQ ID NO: 214 - protein, 1368 aa, Streptococcus pyogenes
MDKKYSIGLAIGTNSVGWAVITDEYKVPSKKFKVLGNTDRHSIKKNLIGALLFDSGETAEATRLKRTARRRYTRRKNRICYLQEIFSNEMAKVDDSFFHRLEESFLVEEDKKHERHPIFGNIVDEVAYHEKYPTIYHLRKKLVDSTDKADLRLIYLALAHMIKFRGHFLIEGDLNPDNSDVDKLFIQLVQTYNQLFEENPINASGVDAKAILSARLSKSRRLENLIAQLPGEKKNGLFGNLIALSLGLTPNFKSNFDLAEDAKLQLSKDTYDDDLDNLLAQIGDQYADLFLAAKNLSDAILLSDILRVNTEITKAPLSASMIKRYDEHHQDLTLLKALVRQQLPEKYKEIFFDQSKNGYAGYIDGGASQEEFYKFIKPILEKMDGTEELLVKLNREDLLRKQRTFDNGSIPHQIHLGELHAILRRQEDFYPFLKDNREKIEKILTFRIPYYVGPLARGNSRFAWMTRKSEETITPWNFEEVVDKGASAQSFIERMTNFDKNLPNEKVLPKHSLLYEYFTVYNELTKVKYVTEGMRKPAFLSGEQKKAIVDLLFKTNRKVTVKQLKEDYFKKIECFDSVEISGVEDRFNASLGTYHDLLKIIKDKDFLDNEENEDILEDIVLTLTLFEDREMIEERLKTYAHLFDDKVMKQLKRRRYTGWGRLSRKLINGIRDKQSGKTILDFLKSDGFANRNFMQLIHDDSLTFKEDIQKAQVSGQGDSLHEHIANLAGSPAIKKGILQTVKVVDELVKVMGRHKPENIVIEMARENQTTQKGQKNSRERMKRIEEGIKELGSQILKEHPVENTQLQNEKLYLYYLQNGRDMYVDQELDINRLSDYDVDAIVPQSFLKDDSIDNKVLTRSDKNRGKSDNVPSEEVVKKMKNYWRQLLNAKLITQRKFDNLTKAERGGLSELDKAGFIKRQLVETRQITKHVAQILDSRMNTKYDENDKLIREVKVITLKSKLVSDFRKDFQFYKVREINNYHHAHDAYLNAVVGTALIKKYPKLESEFVYGDYKVYDVRKMIAKSEQEIGKATAKYFFYSNIMNFFKTEITLANGEIRKRPLIETNGETGEIVWDKGRDFATVRKVLSMPQVNIVKKTEVQTGGFSKESILPKRNSDKLIARKKDWDPKKYGGFDSPTVAYSVLVVAKVEKGKSKKLKSVKELLGITIMERSSFEKNPIDFLEAKGYKEVKKDLIIKLPKYSLFELENGRKRMLASAGELQKGNELALPSKYVNFLYLASHYEKLKGSPEDNEQKQLFVEQHKHYLDEIIEQISEFSKRVILADANLDKVLSAYNKHRDKPIREQAENIIHLFTLTNLGAPAAFKYFDTTIDRKRYTSTKEVLDATLIHQSITGLYETRIDLSQLGGD

SEQ ID NO: 215 - protein, 1368 aa, Streptococcus pyogenes
MDKKYSIGLAIGTNSVGWAVITDEYKVPSKKFKVLGNTDRHSIKKNLIGALLFDSGETAEATRLKRTARRRYTRRKNRICYLQEIFSNEMAKVDDSFFHRLEESFLVEEDKKHERHPIFGNIVDEVAYHEKYPTIYHLRKKLVDSTDKADLRLIYLALAHMIKFRGHFLIEGDLNPDNSDVDKLFIQLVQTYNQLFEENPINASGVDAKAILSARLSKSRRLENLIAQLPGEKKNGLFGNLIALSLGLTPNFKSNFDLAEDAKLQLSKDTYDDDLDNLLAQIGDQYADLFLAAKNLSDAILLSDILRVNTEITKAPLSASMIKRYDEHHQDLTLLKALVRQQLPEKYKEIFFDQSKNGYAGYIDGGASQEEFYKFIKPILEKMDGTEELLVKLNREDLLRKQRTFDNGSIPHQIHLGELHAILRRQEDFYPFLKDNREKIEKILTFRIPYYVGPLARGNSRFAWMTRKSEETITPWNFEEVVDKGASAQSFIERMTNFDKNLPNEKVLPKHSLLYEYFTVYNELTKVKYVTEGMRKPAFLSGEQKKAIVDLLFKTNRKVTVKQLKEDYFKKIECFDSVEISGVEDRFNASLGTYHDLLKIIKDKDFLDNEENEDILEDIVLTLTLFEDREMIEERLKTYAHLFDDKVMKQLKRRRYTGWGRLSRKLINGIRDKQSGKTILDFLKSDGFANRNFMQLIHDDSLTFKEDIQKAQVSGQGDSLHEHIANLAGSPAIKKGILQTVKVVDELVKVMGRHKPENIVIEMARENQTTQKGQKNSRERMKRIEEGIKELGSQILKEHPVENTQLQNEKLYLYYLQNGRDMYVDQELDINRLSDYDVDHIVPQSFLKDDSIDNKVLTRSDKNRGKSDNVPSEEVVKKMKNYWRQLLNAKLITQRKFDNLTKAERGGLSELDKAGFIKRQLVETRQITKHVAQILDSRMNTKYDENDKLIREVKVITLKSKLVSDFRKDFQFYKVREINNYHHAHDAYLNAVVGTALIKKYPKLESEFVYGDYKVYDVRKMIAKSEQEIGKATAKYFFYSNIMNFFKTEITLANGEIRKRPLIETNGETGEIVWDKGRDFATVRKVLSMPQVNIVKKTEVQTGGFSKESILPKRNSDKLIARKKDWDPKKYGGFDSPTVAYSVLVVAKVEKGKSKKLKSVKELLGITIMERSSFEKNPIDFLEAKGYKEVKKDLIIKLPKYSLFELENGRKRMLASAGELQKGNELALPSKYVNFLYLASHYEKLKGSPEDNEQKQLFVEQHKHYLDEIIEQISEFSKRVILADANLDKVLSAYNKHRDKPIREQAENIIHLFTLTNLGAPAAFKYFDTTIDRKRYTSTKEVLDATLIHQSITGLYETRIDLSQLGGD

SEQ ID NO: 216 - protein, 1052 aa, Staphylococcus aureus
KRNYILGLDIGITSVGYGIIDYETRDVIDAGVRLFKEANVENNEGRRSKRGARRLKRRRRHRIQRVKKLLFDYNLLTDHSELSGINPYEARVKGLSQKLSEEEFSAALLHLAKRRGVHNVNEVEEDTGNELSTKEQISRNSKALEEKYVAELQLERLKKDGEVRGSINRFKTSDYVKEAKQLLKVQKAYHQLDQSFIDTYIDLLETRRTYYEGPGEGSPFGWKDIKEWYEMLMGHCTYFPEELRSVKYAYNADLYNALNDLNNLVITRDENEKLEYYEKFQIIENVFKQKKKPTLKQIAKEILVNEEDIKGYRVTSTGKPEFTNLKVYHDIKDITARKEIIENAELLDQIAKILTIYQSSEDIQEELTNLNSELTQEEIEQISNLKGYTGTHNLSLKAINLILDELWHTNDNQIAIFNRLKLVPKKVDLSQQKEIPTTLVDDFILSPVVKRSFIQSIKVINAIIKKYGLPNDIIIELAREKNSKDAQKMINEMQKRNRQTNERIEEIIRTTGKENAKYLIEKIKLHDMQEGKCLYSLEAIPLEDLLNNPFNYEVDHIIPRSVSFDNSFNNKVLVKQEENSKKGNRTPFQYLSSSDSKISYETFKKHILNLAKGKGRISKTKKEYLLEERDINRFSVQKDFINRNLVDTRYATRGLMNLLRSYFRVNNLDVKVKSINGGFTSFLRRKWKFKKERNKGYKHHAEDALIIANADFIFKEWKKLDKAKKVMENQMFEEKQAESMPEIETEQEYKEIFITPHQIKHIKDFKDYKYSHRVDKKPNRELINDTLYSTRKDDKGNTLIVNNLNGLYDKDNDKLKKLINKSPEKLLMYHHDPQTYQKLKLIMEQYGDEKNPLYKYYEETGNYLTKYSKKDNGPVIKKIKYYGNKLNAHLDITDDYPNSRNKVVKLSLKPYRFDVYLDNGVYKFVTVKNLDVIKKENYYEVNSKCYEEAKKLKKISNQAEFIASFYNNDLIKINGELYRVIGVNNDLLNRIEVNMIDITYREYLENMNDKRPPRIIKTIASKTQSIKKYSTDILGNLYEVKSKKHPQIIKKG

SEQ ID NO: 217 - protein, 1082 aa, Geobacillus thermodenitrificans
MKYKIGLDIGITSIGWAVINLDIPRIEDLGVRIFDRAENPKTGESLALPRRLARSARRRLRRRKHRLERIRRLFVREGILTKEELNKLFEKKHEIDVWQLRVEALDRKLNNDELARILLHLAKRRGFRSNRKSERTNKENSTMLKHIEENQSILSSYRTVAEMVVKDPKFSLHKRNKEDNYTNTVARDDLEREIKLIFAKQREYGNIVCTEAFEHEYISIWASQRPFASKDDIEKKVGFCTFEPKEKRAPKATYTFQSFTVWEHINKLRLVSPGGIRALTDDERRLIYKQAFHKNKITFHDVRTLLNLPDDTRFKGLLYDRNTTLKENEKVRFLELGAYHKIRKAIDSVYGKGAAKSFRPIDFDTFGYALTMFKDDTDIRSYLRNEYEQNGKRMENLADKVYDEELIEELLNLSFSKFGHLSLKALRNILPYMEQGEVYSTACERAGYTFTGPKKKQKTVLLPNIPPIANPVVMRALTQARKVVNAIIKKYGSPVSIHIELARELSQSFDERRKMQKEQEGNRKKNETAIRQLVEYGLTLNPTGLDIVKFKLWSEQNGKCAYSLQPIEIERLLEPGYTEVDHVIPYSRSLDDSYTNKVLVLTKENREKGNRTPAEYLGLGSERWQQFETFVLTNKQFSKKKRDRLLRLHYDENEENEFKNRNLNDTRYISRFLANFIREHLKFADSDDKQKVYTVNGRITAHLRSRWNFNKNREESNLHHAVDAAIVACTTPSDIARVTAFYQRREQNKELSKKTDPQFPQPWPHFADELQARLSKNPKESIKALNLGNYDNEKLESLQPVFVSRMPKRSITGAAHQETLRRYIGIDERSGKIQTVVKKKLSEIQLDKTGHFPMYGKESDPRTYEAIRQRLLEHNNDPKKAFQEPLYKPKKNGELGPIIRTIKIIDTTNQVIPLNDGKTVAYNSNIVRVDVFEKDGKYYCVPIYTIDMMKGILPNKAIEPNKPYSEWKEMTEDYTFRFSLYPNDLIRIEFPREKTIKTAVGEEIKIKDLFAYYQTIDSSNGGLSLVSHDNNFSLRSIGSRTLKRFEKYQVDVLGNIYKVRGEKRVGVASSSHSKAGETIRPL

SEQ ID NO: 218 - protein, 1300 aa, Francisella novicida
MSIYQEFVNKYSLSKTLRFELIPQGKTLENIKARGLILDDEKRAKDYKKAKQIIDKYHQFFIEEILSSVCISEDLLQNYSDVYFKLKKSDDDNLQKDFKSAKDTIKKQISEYIKDSEKFKNLFNQNLIDAKKGQESDLILWLKQSKDNGIELFKANSDITDIDEALEIIKSFKGWTTYFKGFHENRKNVYSSNDIPTSIIYRIVDDNLPKFLENKAKYESLKDKAPEAINYEQIKKDLAEELTFDIDYKTSEVNQRVFSLDEVFEIANFNNYLNQSGITKFNTIIGGKFVNGENTKRKGINEYINLYSQQINDKTLKKYKMSVLFKQILSDTESKSFVIDKLEDDSDVVTTMQSFYEQIAAFKTVEEKSIKETLSLLFDDLKAQKLDLSKIYFKNDKSLTDLSQQVFDDYSVIGTAVLEYITQQIAPKNLDNPSKKEQELIAKKTEKAKYLSLETIKLALEEFNKHRDIDKQCRFEEILANFAAIPMIFDEIAQNKDNLAQISIKYQNQGKKDLLQASAEDDVKAIKDLLDQTNNLLHKLKIFHISQSEDKANILDKDEHFYLVFEECYFELANIVPLYNKIRNYITQKPYSDEKFKLNFENSTLANGWDKNKEPDNTAILFIKDDKYYLGVMNKKNNKIFDDKAIKENKGEGYKKIVYKLLPGANKMLPKVFFSAKSIKFYNPSEDILRIRNHSTHTKNGSPQKGYEKFEFNIEDCRKFIDFYKQSISKHPEWKDFGFRFSDTQRYNSIDEFYREVENQGYKLTFENISESYIDSVVNQGKLYLFQIYNKDFSAYSKGRPNLHTLYWKALFDERNLQDVVYKLNGEAELFYRKQSIPKKITHPAKEAIANKNKDNPKKESVFEYDLIKDKRFTEDKFFFHCPITINFKSSGANKFNDEINLLLKEKANDVHILSIDRGERHLAYYTLVDGKGNIIKQDTFNIIGNDRMKTNYHDKLAAIEKDRDSARKDWKKINNIKEMKEGYLSQVVHEIAKLVIEYNAIVVFEDLNFGFKRGRFKVEKQVYQKLEKMLIEKLNYLVFKDNEFDKTGGVLRAYQLTAPFETFKKMGKQTGIIYYVPAGFTSKICPVTGFVNQLYPKYESVSKSQEFFSKFDKICYNLDKGYFEFSFDYKNFGDKAAKGKWTIASFGSRLINFRNSDKNHNWDTREVYPTKELEKLLKDYSIEYGHGECIKAAICGESDKKFFAKLTSVLNTILQMRNSKTGTELDYLISPVADVNGNFFDSRQAPKNMPQDADANGAYHIGLKGLMLLGRIKNNQEGKKLNLVIKNEEYFEFVQNRNN

SEQ ID NO: 219 - protein, 887 aa, Natronobacterium gregoryi
MTVIDLDSTTTADELTSGHTYDISVTLTGVYDNTDEQHPRMSLAFEQDNGERRYITLWKNTTPKDVFTYDYATGSTYIFTNIDYEVKDGYENLTATYQTTVENATAQEVGTTDEDETFAGGEPLDHHLDDALNETPDDAETESDSGHVMTSFASRDQLPEWTLHTYTLTATDGAKTDTEYARRTLAYTVRQELYTDHDAAPVATDGLMLLTPEPLGETPLDLDCGVRVEADETRTLDYTTAKDRLLARELVEEGLKRSLWDDYLVRGIDEVLSKEPVLTCDEFDLHERYDLSVEVGHSGRAYLHINFRHRFVPKLTLADIDDDNIYPGLRVKTTYRPRRGHIVWGLRDECATDSLNTLGNQSVVAYHRNNQTPINTDLLDAIEAADRRVVETRRQGHGDDAVSFPQELLAVEPNTHQIKQFASDGFHQQARSKTRLSASRCSEKAQAFAERLDPVRLNGSTVEFSSEFFTGNNEQQLRLLYENGESVLTFRDGARGAHPDETFSKGIVNPPESFEVAVVLPEQQADTCKAQWDTMADLLNQAGAPPTRSETVQYDAFSSPESISLNVAGAIDPSEVDAAFVVLPPDQEGFADLASPTETYDELKKALANMGIYSQMAYFDRFRDAKIFYTRNVALGLLAAAGGVAFTTEHAMPGDADMFIGIDVSRSYPEDGASGQINIAATATAVYKDGTILGHSSTRPQLGEKLQSTDVRDIMKNAILGYQQVTGESPTHIVIHRDGFMNEDLDPATEFLNEQGVEYDIVEIRKQPQTRLLAVSDVQYDTPVKSIAAINQNEPRATVATFGAPEYLATRDGGGLPRPIQIERVAGETDIETLTRQVYLLSQSHIQVHNSTARLPITTAYADQASTHATKGYLVQTGAFESNVGFL

SEQ ID NO: 220 - protein, 1129 aa, Alicyclobacillus acidoterrestris
MAVKSIKVKLRLDDMPEIRAGLWKLHKEVNAGVRYYTEWLSLLRQENLYRRSPNGDGEQECDKTAEECKAELLERLRARQVENGHRGPAGSDDELLQLARQLYELLVPQAIGAKGDAQQIARKFLSPLADKDAVGGLGIAKAGNKPRWVRMREAGEPGWEEEKEKAETRKSADRTADVLRALADFGLKPLMRVYTDSEMSSVEWKPLRKGQAVRTWDRDMFQQAIERMMSWESWNQRVGQEYAKLVEQKNRFEQKNFVGQEHLVHLVNQLQQDMKEASPGLESKEQTAHYVTGRALRGSDKVFEKWGKLAPDAPFDLYDAEIKNVQRRNTRRFGSHDLFAKLAEPEYQALWREDASFLTRYAVYNSILRKLNHAKMFATFTLPDATAHPIWTRFDKLGGNLHQYTFLFNEFGERRHAIRFHKLLKVENGVAREVDDVTVPISMSEQLDNLLPRDPNEPIALYFRDYGAEQHFTGEFGGAKIQCRRDQLAHMHRRRGARDVYLNVSVRVQSQSEARGERRPPYAAVFRLVGDNHRAFVHFDKLSDYLAEHPDDGKLGSEGLLSGLRVMSVDLGLRTSASISVFRVARKDELKPNSKGRVPFFFPIKGNDNLVAVHERSQLLKLPGETESKDLRAIREERQRTLRQLRTQLAYLRLLVRCGSEDVGRRERSWAKLIEQPVDAANHMTPDWREAFENELQKLKSLHGICSDKEWMDAVYESVRRVWRHMGKQVRDWRKDVRSGERPKIRGYAKDVVGGNSIEQIEYLERQYKFLKSWSFFGKVSGQVIRAEKGSRFAITLREHIDHAKEDRLKKLADRIIMEALGYVYALDERGKGKWVAKYPPCQLILLEELSEYQFNNDRPPSENNQLMQWSHRGVFQELINQAQVHDLLVGTMYAAFSSRFDARTGAPGIRCRRVPARCTQEHNPEPFPWWLNKFVVEHTLDACPLRADDLIPTGEGEIFVSPFSAEEGDFHQIHADLNAAQNLQQRLWSDFDISQIRLRCDWGEVDGELVLIPRLTGKRTADSYSNKVFYTNTGVTYYERERGKKRRKVFAQEKLSEEEAELLVEADEAREKSVVLMRDPSGIINRGNWTRQKEFWSMVNQRIEGYLVKQIRSRVPLQDSACENTGDI

SEQ ID NO: 221 - protein, 1389 aa, Leptotrichia shahii
MGNLFGHKRWYEVRDKKDFKIKRKVKVKRNYDGNKYILNINENNNKEKIDNNKFIRKYINYKKNDNILKEFTRKFHAGNILFKLKGKEGIIRIENNDDFLETEEVVLYIEAYGKSEKLKALGITKKKIIDEAIRQGITKDDKKIEIKRQENEEEIEIDIRDEYTNKTLNDCSIILRIIENDELETKKSIYEIFKNINMSLYKIIEKIIENETEKVFENRYYEEHLREKLLKDDKIDVILTNFMEIREKIKSNLEILGFVKFYLNVGGDKKKSKNKKMLVEKILNINVDLTVEDIADFVIKELEFWNITKRIEKVKKVNNEFLEKRRNRTYIKSYVLLDKHEKFKIERENKKDKIVKFFVENIKNNSIKEKIEKILAEFKIDELIKKLEKELKKGNCDTEIFGIFKKHYKVNFDSKKFSKKSDEEKELYKIIYRYLKGRIEKILVNEQKVRLKKMEKIEIEKILNESILSEKILKRVKQYTLEHIMYLGKLRHNDIDMTTVNTDDFSRLHAKEELDLELITFFASTNMELNKIFSRENINNDENIDFFGGDREKNYVLDKKILNSKIKIIRDLDFIDNKNNITNNFIRKFTKIGTNERNRILHAISKERDLQGTQDDYNKVINIIQNLKISDEEVSKALNLDVVFKDKKNIITKINDIKISEENNNDIKYLPSFSKVLPEILNLYRNNPKNEPFDTIETEKIVLNALIYVNKELYKKLILEDDLEENESKNIFLQELKKTLGNIDEIDENIIENYYKNAQISASKGNNKAIKKYQKKVIECYIGYLRKNYEELFDFSDFKMNIQEIKKQIKDINDNKTYERITVKTSDKTIVINDDFEYIISIFALLNSNAVINKIRNRFFATSVWLNTSEYQNIIDILDEIMQLNTLRNECITENWNLNLEEFIQKMKEIEKDFDDFKIQTKKEIFNNYYEDIKNNILTEFKDDINGCDVLEKKLEKIVIFDDETKFEIDKKSNILQDEQRKLSNINKKDLKKKVDQYIKDKDQEIKSKILCRIIFNSDFLKKYKKEIDNLIEDMESENENKFQEIYYPKERKNELYIYKKNLFLNIGNPNFDKIYGLISNDIKMADAKFLFNIDGKNIRKNKISEIDAILKNLNDKLNGYSKEYKEKYIKKLKENDDFFAKNIQNKNYKSFEKDYNRVSEYKKIRDLVEFNYLNKIESYLIDINWKLAIQMARFERDMHYIVNGLRELGIIKLSGYNTGISRAYPKRNGSDGFYTTTAYYKFFDEESYKKFEKICYGFGIDLSENSEINKPENESIRNYISHFYIVRNPFADYSIAEQIDRVSNLLSYSTRYNNSTYASVFEVFKKDVNLDYDELKKKFKLIGNNDILERLMKPKKVSVLELESYNSDYIKNLIIELLTKIENTNDTL

SEQ ID NO: 222 - protein, 1368 aa, Streptococcus pyogenes
MDKKYSIGLDIGTNSVGWAVITDEYKVPSKKFKVLGNTDRHSIKKNLIGALLFDSGETAEATRLKRTARRRYTRRKNRICYLQEIFSNEMAKVDDSFFHRLEESFLVEEDKKHERHPIFGNIVDEVAYHEKYPTIYHLRKKLVDSTDKADLRLIYLALAHMIKFRGHFLIEGDLNPDNSDVDKLFIQLVQTYNQLFEENPINASGVDAKAILSARLSKSRRLENLIAQLPGEKKNGLFGNLIALSLGLTPNFKSNFDLAEDAKLQLSKDTYDDDLDNLLAQIGDQYADLFLAAKNLSDAILLSDILRVNTEITKAPLSASMIKRYDEHHQDLTLLKALVRQQLPEKYKEIFFDQSKNGYAGYIDGGASQEEFYKFIKPILEKMDGTEELLVKLNREDLLRKQRTFDNGSIPHQIHLGELHAILRRQEDFYPFLKDNREKIEKILTFRIPYYVGPLARGNSRFAWMTRKSEETITPWNFEEVVDKGASAQSFIERMTNFDKNLPNEKVLPKHSLLYEYFTVYNELTKVKYVTEGMRKPAFLSGEQKKAIVDLLFKTNRKVTVKQLKEDYFKKIECFDSVEISGVEDRFNASLGTYHDLLKIIKDKDFLDNEENEDILEDIVLTLTLFEDREMIEERLKTYAHLFDDKVMKQLKRRRYTGWGRLSRKLINGIRDKQSGKTILDFLKSDGFANRNFMQLIHDDSLTFKEDIQKAQVSGQGDSLHEHIANLAGSPAIKKGILQTVKVVDELVKVMGRHKPENIVIEMARENQTTQKGQKNSRERMKRIEEGIKELGSQILKEHPVENTQLQNEKLYLYYLQNGRDMYVDQELDINRLSDYDVDAIVPQSFLKDDSIDNKVLTRSDKNRGKSDNVPSEEVVKKMKNYWRQLLNAKLITQRKFDNLTKAERGGLSELDKAGFIKRQLVETRQITKHVAQILDSRMNTKYDENDKLIREVKVITLKSKLVSDFRKDFQFYKVREINNYHHAHDAYLNAVVGTALIKKYPKLESEFVYGDYKVYDVRKMIAKSEQEIGKATAKYFFYSNIMNFFKTEITLANGEIRKRPLIETNGETGEIVWDKGRDFATVRKVLSMPQVNIVKKTEVQTGGFSKESILPKRNSDKLIARKKDWDPKKYGGFDSPTVAYSVLVVAKVEKGKSKKLKSVKELLGITIMERSSFEKNPIDFLEAKGYKEVKKDLIIKLPKYSLFELENGRKRMLASAGELQKGNELALPSKYVNFLYLASHYEKLKGSPEDNEQKQLFVEQHKHYLDEIIEQISEFSKRVILADANLDKVLSAYNKHRDKPIREQAENIIHLFTLTNLGAPAAFKYFDTTIDRKRYTSTKEVLDATLIHQSITGLYETRIDLSQLGGD

SEQ ID NO: 223 - protein, 1367 aa, Streptococcus pyogenes
DKKYSIGLDIGTNSVGWAVITDEYKVPSKKFKVLGNTDRHSIKKNLIGALLFDSGETAEATRLKRTARRRYTRRKNRICYLQEIFSNEMAKVDDSFFHRLEESFLVEEDKKHERHPIFGNIVDEVAYHEKYPTIYHLRKKLVDSTDKADLRLIYLALAHMIKFRGHFLIEGDLNPDNSDVDKLFIQLVQTYNQLFEENPINASGVDAKAILSARLSKSRRLENLIAQLPGEKKNGLFGNLIALSLGLTPNFKSNFDLAEDAKLQLSKDTYDDDLDNLLAQIGDQYADLFLAAKNLSDAILLSDILRVNTEITKAPLSASMIKRYDEHHQDLTLLKALVRQQLPEKYKEIFFDQSKNGYAGYIDGGASQEEFYKFIKPILEKMDGTEELLVKLNREDLLRKQRTFDNGSIPHQIHLGELHAILRRQEDFYPFLKDNREKIEKILTFRIPYYVGPLARGNSRFAWMTRKSEETITPWNFEEVVDKGASAQSFIERMTNFDKNLPNEKVLPKHSLLYEYFTVYNELTKVKYVTEGMRKPAFLSGEQKKAIVDLLFKTNRKVTVKQLKEDYFKKIECFDSVEISGVEDRFNASLGTYHDLLKIIKDKDFLDNEENEDILEDIVLTLTLFEDREMIEERLKTYAHLFDDKVMKQLKRRRYTGWGRLSRKLINGIRDKQSGKTILDFLKSDGFANRNFMQLIHDDSLTFKEDIQKAQVSGQGDSLHEHIANLAGSPAIKKGILQTVKVVDELVKVMGRHKPENIVIEMARENQTTQKGQKNSRERMKRIEEGIKELGSQILKEHPVENTQLQNEKLYLYYLQNGRDMYVDQELDINRLSDYDVDAIVPQSFLKDDSIDNKVLTRSDKNRGKSDNVPSEEVVKKMKNYWRQLLNAKLITQRKFDNLTKAERGGLSELDKAGFIKRQLVETRQITKHVAQILDSRMNTKYDENDKLIREVKVITLKSKLVSDFRKDFQFYKVREINNYHHAHDAYLNAVVGTALIKKYPKLESEFVYGDYKVYDVRKMIAKSEQEIGKATAKYFFYSNIMNFFKTEITLANGEIRKRPLIETNGETGEIVWDKGRDFATVRKVLSMPQVNIVKKTEVQTGGFSKESILPKRNSDKLIARKKDWDPKKYGGFVSPTVAYSVLVVAKVEKGKSKKLKSVKELLGITIMERSSFEKNPIDFLEAKGYKEVKKDLIIKLPKYSLFELENGRKRMLASARELQKGNELALPSKYVNFLYLASHYEKLKGSPEDNEQKQLFVEQHKHYLDEIIEQISEFSKRVILADANLDKVLSAYNKHRDKPIREQAENIIHLFTLTNLGAPAAFKYFDTTIDRKQYRSTKEVLDATLIHQSITGLYETRIDLSQLGGD

SEQ ID NO: 224 - protein, 1367 aa, Streptococcus pyogenes
DKKYSIGLDIGTNSVGWAVITDEYKVPSKKFKVLGNTDRHSIKKNLIGALLFDSGETAEATRLKRTARRRYTRRKNRICYLQEIFSNEMAKVDDSFFHRLEESFLVEEDKKHERHPIFGNIVDEVAYHEKYPTIYHLRKKLVDSTDKADLRLIYLALAHMIKFRGHFLIEGDLNPDNSDVDKLFIQLVQTYNQLFEENPINASGVDAKAILSARLSKSRRLENLIAQLPGEKKNGLFGNLIALSLGLTPNFKSNFDLAEDAKLQLSKDTYDDDLDNLLAQIGDQYADLFLAAKNLSDAILLSDILRVNTEITKAPLSASMIKRYDEHHQDLTLLKALVRQQLPEKYKEIFFDQSKNGYAGYIDGGASQEEFYKFIKPILEKMDGTEELLVKLNREDLLRKQRTFDNGSIPHQIHLGELHAILRRQEDFYPFLKDNREKIEKILTFRIPYYVGPLARGNSRFAWMTRKSEETITPWNFEEVVDKGASAQSFIERMTNFDKNLPNEKVLPKHSLLYEYFTVYNELTKVKYVTEGMRKPAFLSGEQKKAIVDLLFKTNRKVTVKQLKEDYFKKIECFDSVEISGVEDRFNASLGTYHDLLKIIKDKDFLDNEENEDILEDIVLTLTLFEDREMIEERLKTYAHLFDDKVMKQLKRRRYTGWGRLSRKLINGIRDKQSGKTILDFLKSDGFANRNFMQLIHDDSLTFKEDIQKAQVSGQGDSLHEHIANLAGSPAIKKGILQTVKVVDELVKVMGRHKPENIVIEMARENQTTQKGQKNSRERMKRIEEGIKELGSQILKEHPVENTQLQNEKLYLYYLQNGRDMYVDQELDINRLSDYDVDAIVPQSFLKDDSIDNKVLTRSDKNRGKSDNVPSEEVVKKMKNYWRQLLNAKLITQRKFDNLTKAERGGLSELDKAGFIKRQLVETRQITKHVAQILDSRMNTKYDENDKLIREVKVITLKSKLVSDFRKDFQFYKVREINNYHHAHDAYLNAVVGTALIKKYPKLESEFVYGDYKVYDVRKMIAKSEQEIGKATAKYFFYSNIMNFFKTEITLANGEIRKRPLIETNGETGEIVWDKGRDFATVRKVLSMPQVNIVKKTEVQTGGFSKESILPKRNSDKLIARKKDWDPKKYGGFVSPTVAYSVLVVAKVEKGKSKKLKSVKELLGITIMERSSFEKNPIDFLEAKGYKEVKKDLIIKLPKYSLFELENGRKRMLASARELQKGNELALPSKYVNFLYLASHYEKLKGSPEDNEQKQLFVEQHKHYLDEIIEQISEFSKRVILADANLDKVLSAYNKHRDKPIREQAENIIHLFTLTNLGAPAAFKYFDTTIDRKEYRSTKEVLDATLIHQSITGLYETRIDLSQLGGD

SEQ ID NO: 225 - protein, 1387 aa, Artificial Sequence
  Synthetic
DYKVYDVRKMIAKSEQEIGKATAKYFFYSNIMNFFKTEITLANGEIRKRPLIETNGETGEIVWDKGRDFATVRKVLSMPQVNIVKKTEVQTGGFSKESILPKRNSDKLIARKKDWDPKKYGGFDSPTVAYSVLVVAKVEKGKSKKLKSVKELLGITIMERSSFEKNPIDFLEAKGYKEVKKDLIIKLPKYSLFELENGRKRMLASAGELQKGNELALPSKYVNFLYLASHYEKLKGSPEDNEQKQLFVEQHKHYLDEIIEQISEFSKRVILADANLDKVLSAYNKHRDKPIREQAENIIHLFTLTNLGAPAAFKYFDTTIDRKRYTSTKEVLDATLIHQSITGLYETRIDLSQLGGDGGSGGSGGSGGSGGSGGSGGDKKYSIGLAIGTNSVGWAVITDEYKVPSKKFKVLGNTDRHSIKKNLIGALLFDSGETAEATRLKRTARRRYTRRKNRICYLQEIFSNEMAKVDDSFFHRLEESFLVEEDKKHERHPIFGNIVDEVAYHEKYPTIYHLRKKLVDSTDKADLRLIYLALAHMIKFRGHFLIEGDLNPDNSDVDKLFIQLVQTYNQLFEENPINASGVDAKAILSARLSKSRRLENLIAQLPGEKKNGLFGNLIALSLGLTPNFKSNFDLAEDAKLQLSKDTYDDDLDNLLAQIGDQYADLFLAAKNLSDAILLSDILRVNTEITKAPLSASMIKRYDEHHQDLTLLKALVRQQLPEKYKEIFFDQSKNGYAGYIDGGASQEEFYKFIKPILEKMDGTEELLVKLNREDLLRKQRTFDNGSIPHQIHLGELHAILRRQEDFYPFLKDNREKIEKILTFRIPYYVGPLARGNSRFAWMTRKSEETITPWNFEEVVDKGASAQSFIERMTNFDKNLPNEKVLPKHSLLYEYFTVYNELTKVKYVTEGMRKPAFLSGEQKKAIVDLLFKTNRKVTVKQLKEDYFKKIECFDSVEISGVEDRFNASLGTYHDLLKIIKDKDFLDNEENEDILEDIVLTLTLFEDREMIEERLKTYAHLFDDKVMKQLKRRRYTGWGRLSRKLINGIRDKQSGKTILDFLKSDGFANRNFMQLIHDDSLTFKEDIQKAQVSGQGDSLHEHIANLAGSPAIKKGILQTVKVVDELVKVMGRHKPENIVIEMARENQTTQKGQKNSRERMKRIEEGIKELGSQILKEHPVENTQLQNEKLYLYYLQNGRDMYVDQELDINRLSDYDVDHIVPQSFLKDDSIDNKVLTRSDKNRGKSDNVPSEEVVKKMKNYWRQLLNAKLITQRKFDNLTKAERGGLSELDKAGFIKRQLVETRQITKHVAQILDSRMNTKYDENDKLIREVKVITLKSKLVSDFRKDFQFYKVREINNYHHAHDAYLNAVVGTALIKKYPKLESEFVYG

SEQ ID NO: 226 - protein, 1388 aa, Artificial Sequence
  Synthetic
EIGKATAKYFFYSNIMNFFKTEITLANGEIRKRPLIETNGETGEIVWDKGRDFATVRKVLSMPQVNIVKKTEVQTGGFSKESILPKRNSDKLIARKKDWDPKKYGGFDSPTVAYSVLVVAKVEKGKSKKLKSVKELLGITIMERSSFEKNPIDFLEAKGYKEVKKDLIIKLPKYSLFELENGRKRMLASAGELQKGNELALPSKYVNFLYLASHYEKLKGSPEDNEQKQLFVEQHKHYLDEIIEQISEFSKRVILADANLDKVLSAYNKHRDKPIREQAENIIHLFTLTNLGAPAAFKYFDTTIDRKRYTSTKEVLDATLIHQSITGLYETRIDLSQLGGDGGSGGSGGSGGSGGSGGSGGMDKKYSIGLAIGTNSVGWAVITDEYKVPSKKFKVLGNTDRHSIKKNLIGALLFDSGETAEATRLKRTARRRYTRRKNRICYLQEIFSNEMAKVDDSFFHRLEESFLVEEDKKHERHPIFGNIVDEVAYHEKYPTIYHLRKKLVDSTDKADLRLIYLALAHMIKFRGHFLIEGDLNPDNSDVDKLFIQLVQTYNQLFEENPINASGVDAKAILSARLSKSRRLENLIAQLPGEKKNGLFGNLIALSLGLTPNFKSNFDLAEDAKLQLSKDTYDDDLDNLLAQIGDQYADLFLAAKNLSDAILLSDILRVNTEITKAPLSASMIKRYDEHHQDLTLLKALVRQQLPEKYKEIFFDQSKNGYAGYIDGGASQEEFYKFIKPILEKMDGTEELLVKLNREDLLRKQRTFDNGSIPHQIHLGELHAILRRQEDFYPFLKDNREKIEKILTFRIPYYVGPLARGNSRFAWMTRKSEETITPWNFEEVVDKGASAQSFIERMTNFDKNLPNEKVLPKHSLLYEYFTVYNELTKVKYVTEGMRKPAFLSGEQKKAIVDLLFKTNRKVTVKQLKEDYFKKIECFDSVEISGVEDRFNASLGTYHDLLKIIKDKDFLDNEENEDILEDIVLTLTLFEDREMIEERLKTYAHLFDDKVMKQLKRRRYTGWGRLSRKLINGIRDKQSGKTILDFLKSDGFANRNFMQLIHDDSLTFKEDIQKAQVSGQGDSLHEHIANLAGSPAIKKGILQTVKVVDELVKVMGRHKPENIVIEMARENQTTQKGQKNSRERMKRIEEGIKELGSQILKEHPVENTQLQNEKLYLYYLQNGRDMYVDQELDINRLSDYDVDHIVPQSFLKDDSIDNKVLTRSDKNRGKSDNVPSEEVVKKMKNYWRQLLNAKLITQRKFDNLTKAERGGLSELDKAGFIKRQLVETRQITKHVAQILDSRMNTKYDENDKLIREVKVITLKSKLVSDFRKDFQFYKVREINNYHHAHDAYLNAVVGTALIKKYPKLESEFVYGDYKVYDVRKMIAKSEQ

SEQ ID NO: 227 - protein, 1387 aa, Artificial Sequence
  Synthetic
NIMNFFKTEITLANGEIRKRPLIETNGETGEIVWDKGRDFATVRKVLSMPQVNIVKKTEVQTGGFSKESILPKRNSDKLIARKKDWDPKKYGGFDSPTVAYSVLVVAKVEKGKSKKLKSVKELLGITIMERSSFEKNPIDFLEAKGYKEVKKDLIIKLPKYSLFELENGRKRMLASAGELQKGNELALPSKYVNFLYLASHYEKLKGSPEDNEQKQLFVEQHKHYLDEIIEQISEFSKRVILADANLDKVLSAYNKHRDKPIREQAENIIHLFTLTNLGAPAAFKYFDTTIDRKRYTSTKEVLDATLIHQSITGLYETRIDLSQLGGDGGSGGSGGSGGSGGSGGSGGDKKYSIGLAIGTNSVGWAVITDEYKVPSKKFKVLGNTDRHSIKKNLIGALLFDSGETAEATRLKRTARRRYTRRKNRICYLQEIFSNEMAKVDDSFFHRLEESFLVEEDKKHERHPIFGNIVDEVAYHEKYPTIYHLRKKLVDSTDKADLRLIYLALAHMIKFRGHFLIEGDLNPDNSDVDKLFIQLVQTYNQLFEENPINASGVDAKAILSARLSKSRRLENLIAQLPGEKKNGLFGNLIALSLGLTPNFKSNFDLAEDAKLQLSKDTYDDDLDNLLAQIGDQYADLFLAAKNLSDAILLSDILRVNTEITKAPLSASMIKRYDEHHQDLTLLKALVRQQLPEKYKEIFFDQSKNGYAGYIDGGASQEEFYKFIKPILEKMDGTEELLVKLNREDLLRKQRTFDNGSIPHQIHLGELHAILRRQEDFYPFLKDNREKIEKILTFRIPYYVGPLARGNSRFAWMTRKSEETITPWNFEEVVDKGASAQSFIERMTNFDKNLPNEKVLPKHSLLYEYFTVYNELTKVKYVTEGMRKPAFLSGEQKKAIVDLLFKTNRKVTVKQLKEDYFKKIECFDSVEISGVEDRFNASLGTYHDLLKIIKDKDFLDNEENEDILEDIVLTLTLFEDREMIEERLKTYAHLFDDKVMKQLKRRRYTGWGRLSRKLINGIRDKQSGKTILDFLKSDGFANRNFMQLIHDDSLTFKEDIQKAQVSGQGDSLHEHIANLAGSPAIKKGILQTVKVVDELVKVMGRHKPENIVIEMARENQTTQKGQKNSRERMKRIEEGIKELGSQILKEHPVENTQLQNEKLYLYYLQNGRDMYVDQELDINRLSDYDVDHIVPQSFLKDDSIDNKVLTRSDKNRGKSDNVPSEEVVKKMKNYWRQLLNAKLITQRKFDNLTKAERGGLSELDKAGFIKRQLVETRQITKHVAQILDSRMNTKYDENDKLIREVKVITLKSKLVSDFRKDFQFYKVREINNYHHAHDAYLNAVVGTALIKKYPKLESEFVYGDYKVYDVRKMIAKSEQEIGKATAKYFFYS

SEQ ID NO: 228 - protein, 1388 aa, Artificial Sequence
  Synthetic
PEDNEQKQLFVEQHKHYLDEIIEQISEFSKRVILADANLDKVLSAYNKHRDKPIREQAENIIHLFTLTNLGAPAAFKYFDTTIDRKRYTSTKEVLDATLIHQSITGLYETRIDLSQLGGDGGSGGSGGSGGSGGSGGSGGMDKKYSIGLAIGTNSVGWAVITDEYKVPSKKFKVLGNTDRHSIKKNLIGALLFDSGETAEATRLKRTARRRYTRRKNRICYLQEIFSNEMAKVDDSFFHRLEESFLVEEDKKHERHPIFGNIVDEVAYHEKYPTIYHLRKKLVDSTDKADLRLIYLALAHMIKFRGHFLIEGDLNPDNSDVDKLFIQLVQTYNQLFEENPINASGVDAKAILSARLSKSRRLENLIAQLPGEKKNGLFGNLIALSLGLTPNFKSNFDLAEDAKLQLSKDTYDDDLDNLLAQIGDQYADLFLAAKNLSDAILLSDILRVNTEITKAPLSASMIKRYDEHHQDLTLLKALVRQQLPEKYKEIFFDQSKNGYAGYIDGGASQEEFYKFIKPILEKMDGTEELLVKLNREDLLRKQRTFDNGSIPHQIHLGELHAILRRQEDFYPFLKDNREKIEKILTFRIPYYVGPLARGNSRFAWMTRKSEETITPWNFEEVVDKGASAQSFIERMTNFDKNLPNEKVLPKHSLLYEYFTVYNELTKVKYVTEGMRKPAFLSGEQKKAIVDLLFKTNRKVTVKQLKEDYFKKIECFDSVEISGVEDRFNASLGTYHDLLKIIKDKDFLDNEENEDILEDIVLTLTLFEDREMIEERLKTYAHLFDDKVMKQLKRRRYTGWGRLSRKLINGIRDKQSGKTILDFLKSDGFANRNFMQLIHDDSLTFKEDIQKAQVSGQGDSLHEHIANLAGSPAIKKGILQTVKVVDELVKVMGRHKPENIVIEMARENQTTQKGQKNSRERMKRIEEGIKELGSQILKEHPVENTQLQNEKLYLYYLQNGRDMYVDQELDINRLSDYDVDHIVPQSFLKDDSIDNKVLTRSDKNRGKSDNVPSEEVVKKMKNYWRQLLNAKLITQRKFDNLTKAERGGLSELDKAGFIKRQLVETRQITKHVAQILDSRMNTKYDENDKLIREVKVITLKSKLVSDFRKDFQFYKVREINNYHHAHDAYLNAVVGTALIKKYPKLESEFVYGDYKVYDVRKMIAKSEQEIGKATAKYFFYSNIMNFFKTEITLANGEIRKRPLIETNGETGEIVWDKGRDFATVRKVLSMPQVNIVKKTEVQTGGFSKESILPKRNSDKLIARKKDWDPKKYGGFDSPTVAYSVLVVAKVEKGKSKKLKSVKELLGITIMERSSFEKNPIDFLEAKGYKEVKKDLIIKLPKYSLFELENGRKRMLASAGELQKGNELALPSKYVNFLYLASHYEKLKGS

SEQ ID NO: 229 - protein, 1387 aa, Artificial Sequence
  Synthetic
KPIREQAENIIHLFTLTNLGAPAAFKYFDTTIDRKRYTSTKEVLDATLIHQSITGLYETRIDLSQLGGDGGSGGSGGSGGSGGSGGSGGDKKYSIGLAIGTNSVGWAVITDEYKVPSKKFKVLGNTDRHSIKKNLIGALLFDSGETAEATRLKRTARRRYTRRKNRICYLQEIFSNEMAKVDDSFFHRLEESFLVEEDKKHERHPIFGNIVDEVAYHEKYPTIYHLRKKLVDSTDKADLRLIYLALAHMIKFRGHFLIEGDLNPDNSDVDKLFIQLVQTYNQLFEENPINASGVDAKAILSARLSKSRRLENLIAQLPGEKKNGLFGNLIALSLGLTPNFKSNFDLAEDAKLQLSKDTYDDDLDNLLAQIGDQYADLFLAAKNLSDAILLSDILRVNTEITKAPLSASMIKRYDEHHQDLTLLKALVRQQLPEKYKEIFFDQSKNGYAGYIDGGASQEEFYKFIKPILEKMDGTEELLVKLNREDLLRKQRTFDNGSIPHQIHLGELHAILRRQEDFYPFLKDNREKIEKILTFRIPYYVGPLARGNSRFAWMTRKSEETITPWNFEEVVDKGASAQSFIERMTNFDKNLPNEKVLPKHSLLYEYFTVYNELTKVKYVTEGMRKPAFLSGEQKKAIVDLLFKTNRKVTVKQLKEDYFKKIECFDSVEISGVEDRFNASLGTYHDLLKIIKDKDFLDNEENEDILEDIVLTLTLFEDREMIEERLKTYAHLFDDKVMKQLKRRRYTGWGRLSRKLINGIRDKQSGKTILDFLKSDGFANRNFMQLIHDDSLTFKEDIQKAQVSGQGDSLHEHIANLAGSPAIKKGILQTVKVVDELVKVMGRHKPENIVIEMARENQTTQKGQKNSRERMKRIEEGIKELGSQILKEHPVENTQLQNEKLYLYYLQNGRDMYVDQELDINRLSDYDVDHIVPQSFLKDDSIDNKVLTRSDKNRGKSDNVPSEEVVKKMKNYWRQLLNAKLITQRKFDNLTKAERGGLSELDKAGFIKRQLVETRQITKHVAQILDSRMNTKYDENDKLIREVKVITLKSKLVSDFRKDFQFYKVREINNYHHAHDAYLNAVVGTALIKKYPKLESEFVYGDYKVYDVRKMIAKSEQEIGKATAKYFFYSNIMNFFKTEITLANGEIRKRPLIETNGETGEIVWDKGRDFATVRKVLSMPQVNIVKKTEVQTGGFSKESILPKRNSDKLIARKKDWDPKKYGGFDSPTVAYSVLVVAKVEKGKSKKLKSVKELLGITIMERSSFEKNPIDFLEAKGYKEVKKDLIIKLPKYSLFELENGRKRMLASAGELQKGNELALPSKYVNFLYLASHYEKLKGSPEDNEQKQLFVEQHKHYLDEIIEQISEFSKRVILADANLDKVLSAYNKHRD

SEQ ID NO: 230 - DNA, 19 bp, Artificial Sequence
  Synthetic
aggcagtgggattgtggtg

SEQ ID NO: 231 - DNA, 26 bp, Artificial Sequence
  Synthetic
cggtcagcattaatattgaagtgtgg

SEQ ID NO: 232 - DNA, 22 bp, Artificial Sequence
  Synthetic
ataaagttgcaggaccacttct

SEQ ID NO: 233 - DNA, 17 bp, Artificial Sequence
  Synthetic
gcaagcagcccgtaaac

SEQ ID NO: 234 - DNA, 18 bp, Artificial Sequence
  Synthetic
cgtacgtcggttgctatg

SEQ ID NO: 235 - protein, 1368 aa, Artificial Sequence
  Synthetic
MDKKYSIGLAIGTNSVGWAVITDEYKVPSKKFKVLGNTDRHSIKKNLIGALLFDSGETAEATRLKRTARRRYTRRKNRICYLQEIFSNEMAKVDDSFFHRLEESFLVEEDKKHERHPIFGNIVDEVAYHEKYPTIYHLRKKLVDSTDKADLRLIYLALAHMIKFRGHFLIEGDLNPDNSDVDKLFIQLVQTYNQLFEENPINASGVDAKAILSARLSKSRRLENLIAQLPGEKKNGLFGNLIALSLGLTPNFKSNFDLAEDAKLQLSKDTYDDDLDNLLAQIGDQYADLFLAAKNLSDAILLSDILRVNTEITKAPLSASMIKRYDEHHQDLTLLKALVRQQLPEKYKEIFFDQSKNGYAGYIDGGASQEEFYKFIKPILEKMDGTEELLVKLNREDLLRKQRTFDNGSIPHQIHLGELHAILRRQEDFYPFLKDNREKIEKILTFRIPYYVGPLARGNSRFAWMTRKSEETITPWNFEEVVDKGASAQSFIERMTNFDKNLPNEKVLPKHSLLYEYFTVYNELTKVKYVTEGMRKPAFLSGEQKKAIVDLLFKTNRKVTVKQLKEDYFKKIECFDSVEISGVEDRFNASLGTYHDLLKIIKDKDFLDNEENEDILEDIVLTLTLFEDREMIEERLKTYAHLFDDKVMKQLKRRRYTGWGRLSRKLINGIRDKQSGKTILDFLKSDGFANRNFMQLIHDDSLTFKEDIQKAQVSGQGDSLHEHIANLAGSPAIKKGILQTVKVVDELVKVMGRHKPENIVIEMARENQTTQKGQKNSRERMKRIEEGIKELGSQILKEHPVENTQLQNEKLYLYYLQNGRDMYVDQELDINRLSDYDVDHIVPQSFLKDDSIDNKVLTRSDKNRGKSDNVPSEEVVKKMKNYWRQLLNAKLITQRKFDNLTKAERGGLSELDKAGFIKRQLVETRQITKHVAQILDSRMNTKYDENDKLIREVKVITLKSKLVSDFRKDFQFYKVREINNYHHAHDAYLNAVVGTALIKKYPKLESEFVYGDYKVYDVRKMIAKSEQEIGKATAKYFFYSNIMNFFKTEITLANGEIRKRPLIETNGETGEIVWDKGRDFATVRKVLSMPQVNIVKKTEVQTGGFSKESIRPKRNSDKLIARKKDWDPKKYGGFVSPTVAYSVLVVAKVEKGKSKKLKSVKELLGITIMERSSFEKNPIDFLEAKGYKEVKKDLIIKLPKYSLFELENGRKRMLASARFLQKGNELALPSKYVNFLYLASHYEKLKGSPEDNEQKQLFVEQHKHYLDEIIEQISEFSKRVILADANLDKVLSAYNKHRDKPIREQAENIIHLFTLTNLGAPRAFKYFDTTIDRKVYRSTKEVLDATLIHQSITGLYETRIDLSQLGGD

SEQ ID NO: 236 - protein, 1368 aa, Artificial Sequence
  Synthetic
MDKKYSIGLDIGTNSVGWAVITDEYKVPSKKFKVLGNTDRHSIKKNLIGALLFDSGETAEATRLKRTARRRYTRRKNRICYLQEIFSNEMAKVDDSFFHRLEESFLVEEDKKHERHPIFGNIVDEVAYHEKYPTIYHLRKKLVDSTDKADLRLIYLALAHMIKFRGHFLIEGDLNPDNSDVDKLFIQLVQTYNQLFEENPINASGVDAKAILSARLSKSRRLENLIAQLPGEKKNGLFGNLIALSLGLTPNFKSNFDLAEDTKLQLSKDTYDDDLDNLLAQIGDQYADLFLAAKNLSDAILLSDILRVNTEITKAPLSASMIKLYDEHHQDLTLLKALVRQQLPEKYKEIFFDQSKNGYAGYIDGGASQEEFYKFIKPILEKMDGTEELLVKLNREDLLRKQRTFDNGIIPHQIHLGELHAILRRQEDFYPFLKDNREKIEKILTFRIPYYVGPLARGNSRFAWMTRKSEETITPWNFEKVVDKGASAQSFIERMTNFDKNLPNEKVLPKHSLLYEYFTVYNELTKVKYVTEGMRKPAFLSGDQKKAIVDLLFKTNRKVTVKQLKEDYFKKIECFDSVEISGVEDRFNASLGTYHDLLKIIKDKDFLDNEENEDILEDIVLTLTLFEDREMIEERLKTYAHLFDDKVMKQLKRRRYTGWGRLSRKLINGIRDKQSGKTILDFLKSDGFANRNFIQLIHDDSLTFKEDIQKAQVSGQGDSLHEHIANLAGSPAIKKGILQTVKVVDELVKVMGRHKPENIVIEMARENQTTQKGQKNSRERMKRIEEGIKELGSQILKEHPVENTQLQNEKLYLYYLQNGRDMYVDQELDINRLSDYDVDHIVPQSFLKDDSIDNKVLTRSDKNRGKSDNVPSEEVVKKMKNYWRQLLNAKLITQRKFDNLTKAERGGLSELDKAGFIKRQLVETRQITKHVAQILDSRMNTKYDENDKLIREVKVITLKSKLVSDFRKDFQFYKVREINNYHHAHDAYLNAVVGTALIKKYPKLESEFVYGDYKVYDVRKMIAKSEQEIGKATAKYFFYSNIMNFFKTEITLANGEIRKRPLIETNGETGEIVWDKGRDFATVRKVLSMPQVNIVKKTEVQTGGFSKESILPKRNSDKLIARKKDWDPKKYGGFDSPTVAYSVLVVAKVEKGKSKKLKSVKELLGITIMERSSFEKNPIDFLEAKGYKEVKKDLIIKLPKYSLFELENGRKRMLASAGVLQKGNELALPSKYVNFLYLASHYEKLKGSPEDNEQKQLFVEQHKHYLDEIIEQISEFSKRVILADANLDKVLSAYNKHRDKPIREQAENIIHLFTLTNLGAPAAFKYFDTTIDRKRYTSTKEVLDATLIHQSITGLYETRIDLSQLGGD

SEQ ID NO: 237 - protein, 1368 aa, Artificial Sequence
  Synthetic
MDKKYSIGLAIGTNSVGWAVITDEYKVPSKKFKVLGNTDRHSIKKNLIGALLFDSGETAEATRLKRTARRRYTRRKNRICYLQEIFSNEMAKVDDSFFHRLEESFLVGEDKKHERHPIFGNIVDEVAYHEKYPTIYHLRKKLVDSTDKADLRLIYLALAHMIKFRGHFLIEGDLNPDNSDVDKLFIQLVQTYNQLFEENPINASGVDAKAILSARLAKSRRLENLIAQLPGEKKNGLFGNLIALSLGLTPNFKSNFDLAEDTKLQLSKDTYDDDLDNLLAQIGDQYADLFLAAKNLSDAILLSDILRVNTEITKAPLSASMIKRYDEHHQDLTLLKALVRQQLPEKYKEIFFDQSKNGYAGYIDGGASQEEFYKFIKPILEKMDGTEELLVKLNREDLLRKQRTFDNGIIPHQIHLGELHAILRRQEDFYPFLKDNREKIEKILTFRIPYYVGPLARGNSRFAWMTRKSEETITPWNFEKVVDKGASAQSFIERMTNFDKNLPNEKVLPKHSLLYEYFTVYNELTKVKYVTEGMRKPAFLSGDQKKAIVDLLFKTNRKVTVKQLKEDYFKKIECFDSVEISGVEDRFNASLGTYHDLLKIIKDKDFLDNEENEDILEDIVLTLTLFEDREMIEERLKTYAHLFDDKVMKQLKRRRYTGWGRLSRKLINGIRDKQSGKTILDFLKSDGFANRNFIQLIHDDSLTFKEDIQKAQVSGQGDSLHEHIANLAGSPAIKKGILQTVKVVDELVKVMGRHKPENIVIEMARENQTTQKGQKNSRERMKRIEEGIKELGSQILKEHPVENTQLQNEKLYLYYLQNGRDMYVDQELDINRLSDYDVDHIVPQSFLKDDSIDNKVLTRSDKNRGKSDNVPSEEVVKKMKNYWRQLLNAKLITQRKFDNLTKAERGGLSELDKAGFIKRQLVETRQITKHVAQILDSRMNTKYDENDKLIREVKVITLKSKLVSDFRKDFQFYKVREINNYHHAHDAYLNAVVGTALIKKYPKLESEFVYGDYKVYDVRKMIAKSEQEIGKATAKYFFYSNIMNFFKTEITLANGEIRKRPLIETNGETGEIVWDKGRDFATVRKVLSMPQVNIVKKTEVQTGGFSKESILPKRNSDKLIARKKDWDPKKYGGFDSPTVAYSVLVVAKVEKGKSKKLKSVKELLGITIMERSSFEKNPIDFLEAKGYKEVKKDLIIKLPKYSLFELENGRKRMLASAGVLQKGNELALPSKYVNFLYLASHYEKLKGSPEDNEQKQLFVEQHKHYLDEIIEQISEFSKRVILADANLDKVLSAYNKHRDKPIREQAENIIHLFTLTNLGAPAAFKYFDTTIDRKRYTSTKEVLDATLIHQSITGLYETRIDISQLGGD

SEQ ID NO: 238 - protein, 229 aa, Rattus rattus [sequence omitted]

SEQ ID NO: 239 - protein, 236 aa, Homo sapiens
MTSEKGPSTGDPTLRRRIEPWEFDVFYDPRELRKEACLLYEIKWGMSRKIWRSSGKNTTNHVEVNFIKKFTSERDFHPSMSCSITWFLSWSPCWECSQAIREFLSRHPGVTLVIYVARLFWHMDQQNRQGLRDLVNSGVTIQIMRASEYYHCWRNFVNYPPGDEAHWPQYPPLWMMLYALELHCIILSLPPCLKISRRWQNHLTFFRLHLQNCHYQTIPPHILLATGLIHPSVAWR

SEQ ID NO: 240 - protein, 200 aa, Homo sapiens
MSEASPASGPRHLMDPHIFTSNFNNGIGRHKTYLCYEVERLDNGTSVKMDQHRGFLHNQAKNLLCGFYGRHAELRFLDLVPSLQLDPAQIYRVTWFISWSPCFSWGCAGEVRAFLQENTHVRLRIFAARIYDYDPLYKEALQMLRDAGAQVSIMTYDEFKHCWDTFVDHQGCPFQPWDGLDEHSQALSGRLRAILQNQGN

SEQ ID NO: 241 - protein, 382 aa, Homo sapiens
MNPQIRNPMERMYRDTFYDNFENEPILYGRSYTWLCYEVKIKRGRSNLLWDTGVFRGQVYFKPQYHAEMCFLSWFCGNQLPAYKCFQITWFVSWTPCPDCVAKLAEFLSEHPNVTLTISAARLYYYWERDYRRALCRLSQAGARVTIMDYEEFAYCWENFVYNEGQQFMPWYKFDENYAFLHRTLKEILRYLMDPDTFTFNFNNDPLVLRRRQTYLCYEVERLDNGTWVLMDQHMGFLCNEAKNLLCGFYGRHAELRFLDLVPSLQLDPAQIYRVTWFISWSPCFSWGCAGEVRAFLQENTHVRLRIFAARIYDYDPLYKEALQMLRDAGAQVSIMTYDEFEYCWDTFVYRQGCPFQPWDGLEEHSQALSGRLRAILQNQGN

SEQ ID NO: 242 - protein, 384 aa, Homo sapiens
MKPHFRNTVERMYRDTFSYNFYNRPILSRRNTVWLCYEVKTKGPSRPPLDAKIFRGQVYSELKYHPEMRFFHWFSKWRKLHRDQEYEVTWYISWSPCTKCTRDMATFLAEDPKVTLTIFVARLYYFWDPDYQEALRSLCQKRDGPRATMKIMNYDEFQHCWSKFVYSQRELFEPWNNLPKYYILLHIMLGEILRHSMDPPTFTFNFNNEPWVRGRHETYLCYEVERMHNDTWVLLNQRRGFLCNQAPHKHGFLEGRHAELCFLDVIPFWKLDLDQDYRVTCFTSWSPCFSCAQEMAKFISKNKHVSLCIFTARIYDDQGRCQEGLRTLAEAGAKISIMTYSEFKHCWDTFVDHQGCPFQPWDGLDEHSQDLSGRLRAILQNQEN

SEQ ID NO: 243 - protein, 198 aa, Homo sapiens [sequence omitted]

SEQ ID NO: 244 - protein, 208 aa, Petromyzon marinus
MTDAEYVRIHEKLDIYTFKKQFFNNKKSVSHRCYVLFELKRRGERRACFWGYAVNKPQSGTERGIHAEIFSIRKVEEYLRDNPGQFTINWYSSWSPCADCAEKILEWYNQELRGNGHTLKIWACKLYYEKNARNQIGLWNLRDNGVGLNVMVSEHYQCCRKIFIQSSHNQLNENRWLEKTLKRAEKRRSELSIMIQVKILHTTKSPAV

SEQ ID NO: 245 - protein, 199 aa, Artificial Sequence
  Synthetic
MEASPASGPRHLMDPHIFTSNFNNGIGRHKTYLCYEVERLDNGTSVKMDQHRGFLHGQAKNLLCGFYGRHAELRFLDLVPSLQLDPAQIYRVTWFISWSPCFSWGCAGEVRAFLQENTHVRLRIFAARIYDYDPLYKEALQMLRDAGAQVSIMTYDEFKHCWDTFVDHQGCPFQPWDGLDEHSQALSGRLRAILQNQGN

SEQ ID NO: 246 - protein, 208 aa, Artificial Sequence
  Synthetic
MTDAEYVRIHEKLDIYTFKKQFSNNKKSVSHRCYVLFELKRRGERRACFWGYAVNKPQSGTERGIHAEIFSIRKVEEYLRDNPGQFTINWYSSWSPCADCAEKILEWYNQELRGNGHTLKIWVCKLYYEKNARNQIGLWNLRDNGVGLNVMVSEHYQCCRKIFIQSSHNQLNENRWLEKTLKRAEKRRSELSIMFQVKILHTTKSPAV

SEQ ID NO: 247 - protein, 229 aa, Artificial Sequence
  Synthetic
MSSKTGPVAVDPTLRRRIEPHEFEVFFDPRELRKETCLLYEINWGGRHSIWRHTSQNTNKHVEVNFIEKFTTERYFCPNTRCSITWFLSWSPCGECSRAITEFLSRYPNVTLFIYIARLYHLANPRNRQGLRDLISSGVTIQIMTEQESGYCWHNFVNYSPSNESHWPRYPHLWVRLYVLELYCIILGLPPCLNILRRKQSQLTSFTIALQSCHYQRLPPHILWATGLK

SEQ ID NO: 248 - protein, 229 aa, Artificial Sequence
  Synthetic
MSSETGPVAVDPTLRRRIEPHEFEVFFDPRELRKETCLLYEINWGGRHSIWRHTSQNTNKHVEVNFIEKFTTERYFCPNTRCSITWFLSYSPCGECSRAITEFLSRYPHVTLFIYIARLYHHADPENRQGLRDLISSGVTIQIMTEQESGYCWRNFVNYSPSNEAHWPRYPHLWVRLYVLELYCIILGLPPCLNILRRKQPQLTFFTIALQSCHYQRLPPHILWATGLK

SEQ ID NO: 249 - protein, 229 aa, Artificial Sequence
  Synthetic
MSSETGPVAVDPTLRRRIEPHEFEVFFDPRELRKETCLLYEINWGGRHSIWRHTSQNTNKHVEVNFIEKFTTERYFCPNTRCSITWFLSYSPCGECSRAITEFLSRYPHVTLFIYIARLYHHADPRNRQGLEDLISSGVTIQIMTEQESGYCWRNFVNYSPSNEAHWPRYPHLWVRLYVLELYCIILGLPPCLNILRRKQPQLTFFTIALQSCHYQRLPPHILWATGLK

SEQ ID NO: 250 - protein, 229 aa, Artificial Sequence
  Synthetic
MSSETGPVAVDPTLRRRIEPHEFEVFFDPRELRKETCLLYEINWGGRHSIWRHTSQNTNKHVEVNFIEKFTTERYFCPNTRCSITWFLSYSPCGECSRAITEFLSRYPHVTLFIYIARLYHHADPENRQGLEDLISSGVTIQIMTEQESGYCWRNFVNYSPSNEAHWPRYPHLWVRLYVLELYCIILGLPPCLNILRRKQPQLTFFTIALQSCHYQRLPPHILWATGLK

SEQ ID NO: 251 - protein, 229 aa, Artificial Sequence
  Synthetic
MSSETGPVAVDPTLRRRIEPHEFEVFFDPRELRKETCLLYEINWGGRHSIWRHTSQNTNKHVEVNFIEKFTTERYFCPNTRCSITWFLSWSPCGECSRAITEFLSRYPHVTLFIYIARLYHHADPENRQGLEDLISSGVTIQIMTEQESGYCWRNFVNYSPSNEAHWPRYPHLWVRLYVLELYCIILGLPPCLNILRRKQPQLTFFTIALQSCHYQRLPPHILWATGLK

SEQ ID NO: 252 - protein, 229 aa, Artificial Sequence
  Synthetic
MSSETGPVAVDPTLRRRIEPHEFEVFFDPRELAKETCLLYEINWGGRHSIWRHTSQNTNKHVEVNFIEKFTTERYFCPNTRCSITWFLSWSPCGECSRAITEFLSRYPHVTLFIYIARLYHHADPRNRQGLRDLISSGVTIQIMTEQESGYCWRNFVNYSPSNEAHWPRYPHLWVRLYVLELYCIILGLPPCLNILRRKQPQLTFFTIALQSCHYQRLPPHILWATGLK

SEQ ID NO: 253 - protein, 229 aa, Artificial Sequence
  Synthetic
MSSETGPVAVDPTLRRRIEPHEFEVFFDPRELAAETCLLYEINWGGRHSIWRHTSQNTNKHVEVNFIEKFTTERYFCPNTRCSITWFLSWSPCGECSRAITEFLSRYPHVTLFIYIARLYHHADPRNRQGLRDLISSGVTIQIMTEQESGYCWRNFVNYSPSNEAHWPRYPHLWVRLYVLELYCIILGLPPCLNILRRKQPQLTFFTIALQSCHYQRLPPHILWATGLK

SEQ ID NO: 254 - protein, 229 aa, Artificial Sequence
  Synthetic
MSSETGPVAVDPTLRRRIEPHEFEVFFDPRELAAETCLLYEINWGGRHSIWRHTSQNTNKHVEVNFIEKFTTERYFCPNTRCSITWFLSWSPCGECSRAITEFLSRYPHVTLFIYIARLYHLANPRNRQGLRDLISSGVTIQIMTEQESGYCWRNFVNYSPSNEAHWPRYPHLWVRLYVLELYCIILGLPPCLNILRRKQPQLTFFTIALQSCHYQRLPPHILWATGLK

SEQ ID NO: 255 - protein, 162 aa, Artificial Sequence
  Synthetic
MFERNYDPRELRKETYLLYEIKWGKSGKLWRHWCQNNRTQHAEVYFLENIFNARRFNPSTHCSITWYLSWSPCAECSQKIVDFLKEHPNVNLEIYVARLYYHEDERNRQGLRDLVNSGVTIRIMDLPDYNYCWKTFVSDQGGDEDYWPGHFAPWIKQYSLKL

SEQ ID NO: 256 - protein, 162 aa, Artificial Sequence
  Synthetic
MFERNYDPRELRKETYLLYEIKWGKSGKLWRHWCQNNRTQHAEVYFLENIFNARRFNPSTHCSITWYLSWSPCAECSQKIVDFLKEHPNVNLEIYVARLYYPENERNRQGLRDLVNSGVTIRIMDLPDYNYCWKTFVSDQGGDEDYWPGHFAPWIKQYSLKL

SEQ ID NO: 257 - protein, 1853 aa, Artificial Sequence
  Synthetic
MKRTADGSEFESPKKKRKVSSETGPVAVDPTLRRRIEPHEFEVFFDPRELRKETCLLYEINWGGRHSIWRHTSQNTNKHVEVNFIEKFTTERYFCPNTRCSITWFLSWSPCGECSRAITEFLSRYPHVTLFIYIARLYHHADPRNRQGLRDLISSGVTIQIMTEQESGYCWRNFVNYSPSNEAHWPRYPHLWVRLYVLELYCIILGLPPCLNILRRKQPQLTFFTIALQSCHYQRLPPHILWATGLKSGGSSGGSSGSETPGTSESATPESSGGSSGGSDKKYSIGLAIGTNSVGWAVITDEYKVPSKKFKVLGNTDRHSIKKNLIGALLFDSGETAEATRLKRTARRRYTRRKNRICYLQEIFSNEMAKVDDSFFHRLEESFLVEEDKKHERHPIFGNIVDEVAYHEKYPTIYHLRKKLVDSTDKADLRLIYLALAHMIKFRGHFLIEGDLNPDNSDVDKLFIQLVQTYNQLFEENPINASGVDAKAILSARLSKSRRLENLIAQLPGEKKNGLFGNLIALSLGLTPNFKSNFDLAEDAKLQLSKDTYDDDLDNLLAQIGDQYADLFLAAKNLSDAILLSDILRVNTEITKAPLSASMIKRYDEHHQDLTLLKALVRQQLPEKYKEIFFDQSKNGYAGYIDGGASQEEFYKFIKPILEKMDGTEELLVKLNREDLLRKQRTFDNGSIPHQIHLGELHAILRRQEDFYPFLKDNREKIEKILTFRIPYYVGPLARGNSRFAWMTRKSEETITPWNFEEVVDKGASAQSFIERMTNFDKNLPNEKVLPKHSLLYEYFTVYNELTKVKYVTEGMRKPAFLSGEQKKAIVDLLFKTNRKVTVKQLKEDYFKKIECFDSVEISGVEDRFNASLGTYHDLLKIIKDKDFLDNEENEDILEDIVLTLTLFEDREMIEERLKTYAHLFDDKVMKQLKRRRYTGWGRLSRKLINGIRDKQSGKTILDFLKSDGFANRNFMQLIHDDSLTFKEDIQKAQVSGQGDSLHEHIANLAGSPAIKKGILQTVKVVDELVKVMGRHKPENIVIEMARENQTTQKGQKNSRERMKRIEEGIKELGSQILKEHPVENTQLQNEKLYLYYLQNGRDMYVDQELDINRLSDYDVDHIVPQSFLKDDSIDNKVLTRSDKNRGKSDNVPSEEVVKKMKNYWRQLLNAKLITQRKFDNLTKAERGGLSELDKAGFIKRQLVETRQITKHVAQILDSRMNTKYDENDKLIREVKVITLKSKLVSDFRKDFQFYKVREINNYHHAHDAYLNAVVGTALIKKYPKLESEFVYGDYKVYDVRKMIAKSEQEIGKATAKYFFYSNIMNFFKTEITLANGEIRKRPLIETNGETGEIVWDKGRDFATVRKVLSMPQVNIVKKTEVQTGGFSKESILPKRNSDKLIARKKDWDPKKYGGFDSPTVAYSVLVVAKVEKGKSKKLKSVKELLGITIMERSSFEKNPIDFLEAKGYKEVKKDLIIKLPKYSLFELENGRKRMLASAGELQKGNELALPSKYVNFLYLASHYEKLKGSPEDNEQKQLFVEQHKHYLDEIIEQISEFSKRVILADANLDKVLSAYNKHRDKPIREQAENIIHLFTLTNLGAPAAFKYFDTTIDRKRYTSTKEVLDATLIHQSITGLYETRIDLSQLGGDSGGSGGSGGSTNLSDIIEKETGKQLVIQESILMLPEEVEEVIGNKPESDILVHTAYDESTDENVMLLTSDAPEYKPWALVIQDSNGENKIKMLSGGSGGSGGSTNLSDIIEKETGKQLVIQESILMLPEEVEEVIGNKPESDILVHTAYDESTDENVMLLTSDAPEYKPWALVIQDSNGENKIKMLSGGSKRTADGSEFEPKKKRKV

SEQ ID NO: 258 - protein, 1853 aa, Artificial Sequence
  Synthetic
MKRTADGSEFESPKKKRKVSSETGPVAVDPTLRRRIEPHEFEVFFDPRELRKETCLLYEINWGGRHSIWRHTSQNTNKHVEVNFIEKFTTERYFCPNTRCSITWFLSYSPCGECSRAITEFLSRYPHVTLFIYIARLYHHADPENRQGLRDLISSGVTIQIMTEQESGYCWRNFVNYSPSNEAHWPRYPHLWVRLYVLELYCIILGLPPCLNILRRKQPQLTFFTIALQSCHYQRLPPHILWATGLKSGGSSGGSSGSETPGTSESATPESSGGSSGGSDKKYSIGLAIGTNSVGWAVITDEYKVPSKKFKVLGNTDRHSIKKNLIGALLFDSGETAEATRLKRTARRRYTRRKNRICYLQEIFSNEMAKVDDSFFHRLEESFLVEEDKKHERHPIFGNIVDEVAYHEKYPTIYHLRKKLVDSTDKADLRLIYLALAHMIKFRGHFLIEGDLNPDNSDVDKLFIQLVQTYNQLFEENPINASGVDAKAILSARLSKSRRLENLIAQLPGEKKNGLFGNLIALSLGLTPNFKSNFDLAEDAKLQLSKDTYDDDLDNLLAQIGDQYADLFLAAKNLSDAILLSDILRVNTEITKAPLSASMIKRYDEHHQDLTLLKALVRQQLPEKYKEIFFDQSKNGYAGYIDGGASQEEFYKFIKPILEKMDGTEELLVKLNREDLLRKQRTFDNGSIPHQIHLGELHAILRRQEDFYPFLKDNREKIEKILTFRIPYYVGPLARGNSRFAWMTRKSEETITPWNFEEVVDKGASAQSFIERMTNFDKNLPNEKVLPKHSLLYEYFTVYNELTKVKYVTEGMRKPAFLSGEQKKAIVDLLFKTNRKVTVKQLKEDYFKKIECFDSVEISGVEDRFNASLGTYHDLLKIIKDKDFLDNEENEDILEDIVLTLTLFEDREMIEERLKTYAHLFDDKVMKQLKRRRYTGWGRLSRKLINGIRDKQSGKTILDFLKSDGFANRNFMQLIHDDSLTFKEDIQKAQVSGQGDSLHEHIANLAGSPAIKKGILQTVKVVDELVKVMGRHKPENIVIEMARENQTTQKGQKNSRERMKRIEEGIKELGSQILKEHPVENTQLQNEKLYLYYLQNGRDMYVDQELDINRLSDYDVDHIVPQSFLKDDSIDNKVLTRSDKNRGKSDNVPSEEVVKKMKNYWRQLLNAKLITQRKFDNLTKAERGGLSELDKAGFIKRQLVETRQITKHVAQILDSRMNTKYDENDKLIREVKVITLKSKLVSDFRKDFQFYKVREINNYHHAHDAYLNAVVGTALIKKYPKLESEFVYGDYKVYDVRKMIAKSEQEIGKATAKYFFYSNIMNFFKTEITLANGEIRKRPLIETNGETGEIVWDKGRDFATVRKVLSMPQVNIVKKTEVQTGGFSKESILPKRNSDKLIARKKDWDPKKYGGFDSPTVAYSVLVVAKVEKGKSKKLKSVKELLGITIMERSSFEKNPIDFLEAKGYKEVKKDLIIKLPKYSLFELENGRKRMLASAGELQKGNELALPSKYVNFLYLASHYEKLKGSPEDNEQKQLFVEQHKHYLDEIIEQISEFSKRVILADANLDKVLSAYNKHRDKPIREQAENIIHLFTLTNLGAPAAFKYFDTTIDRKRYTSTKEVLDATLIHQSITGLYETRIDLSQLGGDSGGSGGSGGSTNLSDIIEKETGKQLVIQESILMLPEEVEEVIGNKPESDILVHTAYDESTDENVMLLTSDAPEYKPWALVIQDSNGENKIKMLSGGSGGSGGSTNLSDIIEKETGKQLVIQESILMLPEEVEEVIGNKPESDILVHTAYDESTDENVMLLTSDAPEYKPWALVIQDSNGENKIKMLSGGSKRTADGSEFEPKKKRKV

SEQ ID NO: 259 - protein, 1853 aa, Artificial Sequence
  Synthetic
MKRTADGSEFESPKKKRKVSSETGPVAVDPTLRRRIEPHEFEVFFDPRELRKETCLLYEINWGGRHSIWRHTSQNTNKHVEVNFIEKFTTERYFCPNTRCSITWFLSYSPCGECSRAITEFLSRYPHVTLFIYIARLYHHADPRNRQGLEDLISSGVTIQIMTEQESGYCWRNFVNYSPSNEAHWPRYPHLWVRLYVLELYCIILGLPPCLNILRRKQPQLTFFTIALQSCHYQRLPPHILWATGLKSGGSSGGSSGSETPGTSESATPESSGGSSGGSDKKYSIGLAIGTNSVGWAVITDEYKVPSKKFKVLGNTDRHSIKKNLIGALLFDSGETAEATRLKRTARRRYTRRKNRICYLQEIFSNEMAKVDDSFFHRLEESFLVEEDKKHERHPIFGNIVDEVAYHEKYPTIYHLRKKLVDSTDKADLRLIYLALAHMIKFRGHFLIEGDLNPDNSDVDKLFIQLVQTYNQLFEENPINASGVDAKAILSARLSKSRRLENLIAQLPGEKKNGLFGNLIALSLGLTPNFKSNFDLAEDAKLQLSKDTYDDDLDNLLAQIGDQYADLFLAAKNLSDAILLSDILRVNTEITKAPLSASMIKRYDEHHQDLTLLKALVRQQLPEKYKEIFFDQSKNGYAGYIDGGASQEEFYKFIKPILEKMDGTEELLVKLNREDLLRKQRTFDNGSIPHQIHLGELHAILRRQEDFYPFLKDNREKIEKILTFRIPYYVGPLARGNSRFAWMTRKSEETITPWNFEEVVDKGASAQSFIERMTNFDKNLPNEKVLPKHSLLYEYFTVYNELTKVKYVTEGMRKPAFLSGEQKKAIVDLLFKTNRKVTVKQLKEDYFKKIECFDSVEISGVEDRFNASLGTYHDLLKIIKDKDFLDNEENEDILEDIVLTLTLFEDREMIEERLKTYAHLFDDKVMKQLKRRRYTGWGRLSRKLINGIRDKQSGKTILDFLKSDGFANRNFMQLIHDDSLTFKEDIQKAQVSGQGDSLHEHIANLAGSPAIKKGILQTVKVVDELVKVMGRHKPENIVIEMARENQTTQKGQKNSRERMKRIEEGIKELGSQILKEHPVENTQLQNEKLYLYYLQNGRDMYVDQELDINRLSDYDVDHIVPQSFLKDDSIDNKVLTRSDKNRGKSDNVPSEEVVKKMKNYWRQLLNAKLITQRKFDNLTKAERGGLSELDKAGFIKRQLVETRQITKHVAQILDSRMNTKYDENDKLIREVKVITLKSKLVSDFRKDFQFYKVREINNYHHAHDAYLNAVVGTALIKKYPKLESEFVYGDYKVYDVRKMIAKSEQEIGKATAKYFFYSNIMNFFKTEITLANGEIRKRPLIETNGETGEIVWDKGRDFATVRKVLSMPQVNIVKKTEVQTGGFSKESILPKRNSDKLIARKKDWDPKKYGGFDSPTVAYSVLVVAKVEKGKSKKLKSVKELLGITIMERSSFEKNPIDFLEAKGYKEVKKDLIIKLPKYSLFELENGRKRMLASAGELQKGNELALPSKYVNFLYLASHYEKLKGSPEDNEQKQLFVEQHKHYLDEIIEQISEFSKRVILADANLDKVLSAYNKHRDKPIREQAENIIHLFTLTNLGAPAAFKYFDTTIDRKRYTSTKEVLDATLIHQSITGLYETRIDLSQLGGDSGGSGGSGGSTNLSDIIEKETGKQLVIQESILMLPEEVEEVIGNKPESDILVHTAYDESTDENVMLLTSDAPEYKPWALVIQDSNGENKIKMLSGGSGGSGGSTNLSDIIEKETGKQLVIQESILMLPEEVEEVIGNKPESDILVHTAYDESTDENVMLLTSDAPEYKPWALVIQDSNGENKIKMLSGGSKRTADGSEFEPKKKRKV

SEQ ID NO: 260 - protein, 1853 aa, Artificial Sequence
  Synthetic
MKRTADGSEFESPKKKRKVSSETGPVAVDPTLRRRIEPHEFEVFFDPRELRKETCLLYEINWGGRHSIWRHTSQNTNKHVEVNFIEKFTTERYFCPNTRCSITWFLSYSPCGECSRAITEFLSRYPHVTLFIYIARLYHHADPENRQGLEDLISSGVTIQIMTEQESGYCWRNFVNYSPSNEAHWPRYPHLWVRLYVLELYCIILGLPPCLNILRRKQPQLTFFTIALQSCHYQRLPPHILWATGLKSGGSSGGSSGSETPGTSESATPESSGGSSGGSDKKYSIGLAIGTNSVGWAVITDEYKVPSKKFKVLGNTDRHSIKKNLIGALLFDSGETAEATRLKRTARRRYTRRKNRICYLQEIFSNEMAKVDDSFFHRLEESFLVEEDKKHERHPIFGNIVDEVAYHEKYPTIYHLRKKLVDSTDKADLRLIYLALAHMIKFRGHFLIEGDLNPDNSDVDKLFIQLVQTYNQLFEENPINASGVDAKAILSARLSKSRRLENLIAQLPGEKKNGLFGNLIALSLGLTPNFKSNFDLAEDAKLQLSKDTYDDDLDNLLAQIGDQYADLFLAAKNLSDAILLSDILRVNTEITKAPLSASMIKRYDEHHQDLTLLKALVRQQLPEKYKEIFFDQSKNGYAGYIDGGASQEEFYKFIKPILEKMDGTEELLVKLNREDLLRKQRTFDNGSIPHQIHLGELHAILRRQEDFYPFLKDNREKIEKILTFRIPYYVGPLARGNSRFAWMTRKSEETITPWNFEEVVDKGASAQSFIERMTNFDKNLPNEKVLPKHSLLYEYFTVYNELTKVKYVTEGMRKPAFLSGEQKKAIVDLLFKTNRKVTVKQLKEDYFKKIECFDSVEISGVEDRFNASLGTYHDLLKIIKDKDFLDNEENEDILEDIVLTLTLFEDREMIEERLKTYAHLFDDKVMKQLKRRRYTGWGRLSRKLINGIRDKQSGKTILDFLKSDGFANRNFMQLIHDDSLTFKEDIQKAQVSGQGDSLHEHIANLAGSPAIKKGILQTVKVVDELVKVMGRHKPENIVIEMARENQTTQKGQKNSRERMKRIEEGIKELGSQILKEHPVENTQLQNEKLYLYYLQNGRDMYVDQELDINRLSDYDVDHIVPQSFLKDDSIDNKVLTRSDKNRGKSDNVPSEEVVKKMKNYWRQLLNAKLITQRKFDNLTKAERGGLSELDKAGFIKRQLVETRQITKHVAQILDSRMNTKYDENDKLIREVKVITLKSKLVSDFRKDFQFYKVREINNYHHAHDAYLNAVVGTALIKKYPKLESEFVYGDYKVYDVRKMIAKSEQEIGKATAKYFFYSNIMNFFKTEITLANGEIRKRPLIETNGETGEIVWDKGRDFATVRKVLSMPQVNIVKKTEVQTGGFSKESILPKRNSDKLIARKKDWDPKKYGGFDSPTVAYSVLVVAKVEKGKSKKLKSVKELLGITIMERSSFEKNPIDFLEAKGYKEVKKDLIIKLPKYSLFELENGRKRMLASAGELQKGNELALPSKYVNFLYLASHYEKLKGSPEDNEQKQLFVEQHKHYLDEIIEQISEFSKRVILADANLDKVLSAYNKHRDKPIREQAENIIHLFTLTNLGAPAAFKYFDTTIDRKRYTSTKEVLDATLIHQSITGLYETRIDLSQLGGDSGGSGGSGGSTNLSDIIEKETGKQLVIQESILMLPEEVEEVIGNKPESDILVHTAYDESTDENVMLLTSDAPEYKPWALVIQDSNGENKIKMLSGGSGGSGGSTNLSDIIEKETGKQLVIQESILMLPEEVEEVIGNKPESDILVHTAYDESTDENVMLLTSDAPEYKPWALVIQDSNGENKIKMLSGGSKRTADGSEFEPKKKRKV

SEQ ID NO: 261 - protein, 1853 aa, Artificial Sequence
  Synthetic
MKRTADGSEFESPKKKRKVSSETGPVAVDPTLRRRIEPHEFEVFFDPRELRKETCLLYEINWGGRHSIWRHTSQNTNKHVEVNFIEKFTTERYFCPNTRCSITWFLSWSPCGECSRAITEFLSRYPHVTLFIYIARLYHHADPENRQGLEDLISSGVTIQIMTEQESGYCWRNFVNYSPSNEAHWPRYPHLWVRLYVLELYCIILGLPPCLNILRRKQPQLTFFTIALQSCHYQRLPPHILWATGLKSGGSSGGSSGSETPGTSESATPESSGGSSGGSDKKYSIGLAIGTNSVGWAVITDEYKVPSKKFKVLGNTDRHSIKKNLIGALLFDSGETAEATRLKRTARRRYTRRKNRICYLQEIFSNEMAKVDDSFFHRLEESFLVEEDKKHERHPIFGNIVDEVAYHEKYPTIYHLRKKLVDSTDKADLRLIYLALAHMIKFRGHFLIEGDLNPDNSDVDKLFIQLVQTYNQLFEENPINASGVDAKAILSARLSKSRRLENLIAQLPGEKKNGLFGNLIALSLGLTPNFKSNFDLAEDAKLQLSKDTYDDDLDNLLAQIGDQYADLFLAAKNLSDAILLSDILRVNTEITKAPLSASMIKRYDEHHQDLTLLKALVRQQLPEKYKEIFFDQSKNGYAGYIDGGASQEEFYKFIKPILEKMDGTEELLVKLNREDLLRKQRTFDNGSIPHQIHLGELHAILRRQEDFYPFLKDNREKIEKILTFRIPYYVGPLARGNSRFAWMTRKSEETITPWNFEEVVDKGASAQSFIERMTNFDKNLPNEKVLPKHSLLYEYFTVYNELTKVKYVTEGMRKPAFLSGEQKKAIVDLLFKTNRKVTVKQLKEDYFKKIECFDSVEISGVEDRFNASLGTYHDLLKIIKDKDFLDNEENEDILEDIVLTLTLFEDREMIEERLKTYAHLFDDKVMKQLKRRRYTGWGRLSRKLINGIRDKQSGKTILDFLKSDGFANRNFMQLIHDDSLTFKEDIQKAQVSGQGDSLHEHIANLAGSPAIKKGILQTVKVVDELVKVMGRHKPENIVIEMARENQTTQKGQKNSRERMKRIEEGIKELGSQILKEHPVENTQLQNEKLYLYYLQNGRDMYVDQELDINRLSDYDVDHIVPQSFLKDDSIDNKVLTRSDKNRGKSDNVPSEEVVKKMKNYWRQLLNAKLITQRKFDNLTKAERGGLSELDKAGFIKRQLVETRQITKHVAQILDSRMNTKYDENDKLIREVKVITLKSKLVSDFRKDFQFYKVREINNYHHAHDAYLNAVVGTALIKKYPKLESEFVYGDYKVYDVRKMIAKSEQEIGKATAKYFFYSNIMNFFKTEITLANGEIRKRPLIETNGETGEIVWDKGRDFATVRKVLSMPQVNIVKKTEVQTGGFSKESILPKRNSDKLIARKKDWDPKKYGGFDSPTVAYSVLVVAKVEKGKSKKLKSVKELLGITIMERSSFEKNPIDFLEAKGYKEVKKDLIIKLPKYSLFELENGRKRMLASAGELQKGNELALPSKYVNFLYLASHYEKLKGSPEDNEQKQLFVEQHKHYLDEIIEQISEFSKRVILADANLDKVLSAYNKHRDKPIREQAENIIHLFTLTNLGAPAAFKYFDTTIDRKRYTSTKEVLDATLIHQSITGLYETRIDLSQLGGDSGGSGGSGGSTNLSDIIEKETGKQLVIQESILMLPEEVEEVIGNKPESDILVHTAYDESTDENVMLLTSDAPEYKPWALVIQDSNGENKIKMLSGGSGGSGGSTNLSDIIEKETGKQLVIQESILMLPEEVEEVIGNKPESDILVHTAYDESTDENVMLLTSDAPEYKPWALVIQDSNGENKIKMLSGGSKRTADGSEFEPKKKRKV

SEQ ID NO: 262 - protein, 1853 aa, Artificial Sequence
  Synthetic
MKRTADGSEFESPKKKRKVSSETGPVAVDPTLRRRIEPHEFEVFFDPRELAKETCLLYEINWGGRHSIWRHTSQNTNKHVEVNFIEKFTTERYFCPNTRCSITWFLSWSPCGECSRAITEFLSRYPHVTLFIYIARLYHHADPRNRQGLRDLISSGVTIQIMTEQESGYCWRNFVNYSPSNEAHWPRYPHLWVRLYVLELYCIILGLPPCLNILRRKQPQLTFFTIALQSCHYQRLPPHILWATGLKSGGSSGGSSGSETPGTSESATPESSGGSSGGSDKKYSIGLAIGTNSVGWAVITDEYKVPSKKFKVLGNTDRHSIKKNLIGALLFDSGETAEATRLKRTARRRYTRRKNRICYLQEIFSNEMAKVDDSFFHRLEESFLVEEDKKHERHPIFGNIVDEVAYHEKYPTIYHLRKKLVDSTDKADLRLIYLALAHMIKFRGHFLIEGDLNPDNSDVDKLFIQLVQTYNQLFEENPINASGVDAKAILSARLSKSRRLENLIAQLPGEKKNGLFGNLIALSLGLTPNFKSNFDLAEDAKLQLSKDTYDDDLDNLLAQIGDQYADLFLAAKNLSDAILLSDILRVNTEITKAPLSASMIKRYDEHHQDLTLLKALVRQQLPEKYKEIFFDQSKNGYAGYIDGGASQEEFYKFIKPILEKMDGTEELLVKLNREDLLRKQRTFDNGSIPHQIHLGELHAILRRQEDFYPFLKDNREKIEKILTFRIPYYVGPLARGNSRFAWMTRKSEETITPWNFEEVVDKGASAQSFIERMTNFDKNLPNEKVLPKHSLLYEYFTVYNELTKVKYVTEGMRKPAFLSGEQKKAIVDLLFKTNRKVTVKQLKEDYFKKIECFDSVEISGVEDRFNASLGTYHDLLKIIKDKDFLDNEENEDILEDIVLTLTLFEDREMIEERLKTYAHLFDDKVMKQLKRRRYTGWGRLSRKLINGIRDKQSGKTILDFLKSDGFANRNFMQLIHDDSLTFKEDIQKAQVSGQGDSLHEHIANLAGSPAIKKGILQTVKVVDELVKVMGRHKPENIVIEMARENQTTQKGQKNSRERMKRIEEGIKELGSQILKEHPVENTQLQNEKLYLYYLQNGRDMYVDQELDINRLSDYDVDHIVPQSFLKDDSIDNKVLTRSDKNRGKSDNVPSEEVVKKMKNYWRQLLNAKLITQRKFDNLTKAERGGLSELDKAGFIKRQLVETRQITKHVAQILDSRMNTKYDENDKLIREVKVITLKSKLVSDFRKDFQFYKVREINNYHHAHDAYLNAVVGTALIKKYPKLESEFVYGDYKVYDVRKMIAKSEQEIGKATAKYFFYSNIMNFFKTEITLANGEIRKRPLIETNGETGEIVWDKGRDFATVRKVLSMPQVNIVKKTEVQTGGFSKESILPKRNSDKLIARKKDWDPKKYGGFDSPTVAYSVLVVAKVEKGKSKKLKSVKELLGITIMERSSFEKNPIDFLEAKGYKEVKKDLIIKLPKYSLFELENGRKRMLASAGELQKGNELALPSKYVNFLYLASHYEKLKGSPEDNEQKQLFVEQHKHYLDEIIEQISEFSKRVILADANLDKVLSAYNKHRDKPIREQAENIIHLFTLTNLGAPAAFKYFDTTIDRKRYTSTKEVLDATLIHQSITGLYETRIDLSQLGGDSGGSGGSGGSTNLSDIIEKETGKQLVIQESILMLPEEVEEVIGNKPESDILVHTAYDESTDENVMLLTSDAPEYKPWALVIQDSNGENKIKMLSGGSGGSGGSTNLSDIIEKETGKQLVIQESILMLPEEVEEVIGNKPESDILVHTAYDESTDENVMLLTSDAPEYKPWALVIQDSNGENKIKMLSGGSKRTADGSEFEPKKKRKV

SEQ ID NO: 263 - protein, 1853 aa, Artificial Sequence
  Synthetic
MKRTADGSEFESPKKKRKVSSETGPVAVDPTLRRRIEPHEFEVFFDPRELAAETCLLYEINWGGRHSIWRHTSQNTNKHVEVNFIEKFTTERYFCPNTRCSITWFLSWSPCGECSRAITEFLSRYPHVTLFIYIARLYHHADPRNRQGLRDLISSGVTIQIMTEQESGYCWRNFVNYSPSNEAHWPRYPHLWVRLYVLELYCIILGLPPCLNILRRKQPQLTFFTIALQSCHYQRLPPHILWATGLKSGGSSGGSSGSETPGTSESATPESSGGSSGGSDKKYSIGLAIGTNSVGWAVITDEYKVPSKKFKVLGNTDRHSIKKNLIGALLFDSGETAEATRLKRTARRRYTRRKNRICYLQEIFSNEMAKVDDSFFHRLEESFLVEEDKKHERHPIFGNIVDEVAYHEKYPTIYHLRKKLVDSTDKADLRLIYLALAHMIKFRGHFLIEGDLNPDNSDVDKLFIQLVQTYNQLFEENPINASGVDAKAILSARLSKSRRLENLIAQLPGEKKNGLFGNLIALSLGLTPNFKSNFDLAEDAKLQLSKDTYDDDLDNLLAQIGDQYADLFLAAKNLSDAILLSDILRVNTEITKAPLSASMIKRYDEHHQDLTLLKALVRQQLPEKYKEIFFDQSKNGYAGYIDGGASQEEFYKFIKPILEKMDGTEELLVKLNREDLLRKQRTFDNGSIPHQIHLGELHAILRRQEDFYPFLKDNREKIEKILTFRIPYYVGPLARGNSRFAWMTRKSEETITPWNFEEVVDKGASAQSFIERMTNFDKNLPNEKVLPKHSLLYEYFTVYNELTKVKYVTEGMRKPAFLSGEQKKAIVDLLFKTNRKVTVKQLKEDYFKKIECFDSVEISGVEDRFNASLGTYHDLLKIIKDKDFLDNEENEDILEDIVLTLTLFEDREMIEERLKTYAHLFDDKVMKQLKRRRYTGWGRLSRKLINGIRDKQSGKTILDFLKSDGFANRNFMQLIHDDSLTFKEDIQKAQVSGQGDSLHEHIANLAGSPAIKKGILQTVKVVDELVKVMGRHKPENIVIEMARENQTTQKGQKNSRERMKRIEEGIKELGSQILKEHPVENTQLQNEKLYLYYLQNGRDMYVDQELDINRLSDYDVDHIVPQSFLKDDSIDNKVLTRSDKNRGKSDNVPSEEVVKKMKNYWRQLLNAKLITQRKFDNLTKAERGGLSELDKAGFIKRQLVETRQITKHVAQILDSRMNTKYDENDKLIREVKVITLKSKLVSDFRKDFQFYKVREINNYHHAHDAYLNAVVGTALIKKYPKLESEFVYGDYKVYDVRKMIAKSEQEIGKATAKYFFYSNIMNFFKTEITLANGEIRKRPLIETNGETGEIVWDKGRDFATVRKVLSMPQVNIVKKTEVQTGGFSKESILPKRNSDKLIARKKDWDPKKYGGFDSPTVAYSVLVVAKVEKGKSKKLKSVKELLGITIMERSSFEKNPIDFLEAKGYKEVKKDLIIKLPKYSLFELENGRKRMLASAGELQKGNELALPSKYVNFLYLASHYEKLKGSPEDNEQKQLFVEQHKHYLDEIIEQISEFSKRVILADANLDKVLSAYNKHRDKPIREQAENIIHLFTLTNLGAPAAFKYFDTTIDRKRYTSTKEVLDATLIHQSITGLYETRIDLSQLGGDSGGSGGSGGSTNLSDIIEKETGKQLVIQESILMLPEEVEEVIGNKPESDILVHTAYDESTDENVMLLTSDAPEYKPWALVIQDSNGENKIKMLSGGSGGSGGSTNLSDIIEKETGKQLVIQESILMLPEEVEEVIGNKPESDILVHTAYDESTDENVMLLTSDAPEYKPWALVIQDSNGENKIKMLSGGSKRTADGSEFEPKKKRKV

SEQ ID NO: 264 - protein, 1824 aa, Artificial Sequence
  Synthetic
MKRTADGSEFESPKKKRKVSEASPASGPRHLMDPHIFTSNFNNGIGRHKTYLCYEVERLDNGTSVKMDQHRGFLHNQAKNLLCGFYGRHAELRFLDLVPSLQLDPAQIYRVTWFISWSPCFSWGCAGEVRAFLQENTHVRLRIFAARIYDYDPLYKEALQMLRDAGAQVSIMTYDEFKHCWDTFVDHQGCPFQPWDGLDEHSQALSGRLRAILQNQGNSGGSSGGSSGSETPGTSESATPESSGGSSGGSDKKYSIGLAIGTNSVGWAVITDEYKVPSKKFKVLGNTDRHSIKKNLIGALLFDSGETAEATRLKRTARRRYTRRKNRICYLQEIFSNEMAKVDDSFFHRLEESFLVEEDKKHERHPIFGNIVDEVAYHEKYPTIYHLRKKLVDSTDKADLRLIYLALAHMIKFRGHFLIEGDLNPDNSDVDKLFIQLVQTYNQLFEENPINASGVDAKAILSARLSKSRRLENLIAQLPGEKKNGLFGNLIALSLGLTPNFKSNFDLAEDAKLQLSKDTYDDDLDNLLAQIGDQYADLFLAAKNLSDAILLSDILRVNTEITKAPLSASMIKRYDEHHQDLTLLKALVRQQLPEKYKEIFFDQSKNGYAGYIDGGASQEEFYKFIKPILEKMDGTEELLVKLNREDLLRKQRTFDNGSIPHQIHLGELHAILRRQEDFYPFLKDNREKIEKILTFRIPYYVGPLARGNSRFAWMTRKSEETITPWNFEEVVDKGASAQSFIERMTNFDKNLPNEKVLPKHSLLYEYFTVYNELTKVKYVTEGMRKPAFLSGEQKKAIVDLLFKTNRKVTVKQLKEDYFKKIECFDSVEISGVEDRFNASLGTYHDLLKIIKDKDFLDNEENEDILEDIVLTLTLFEDREMIEERLKTYAHLFDDKVMKQLKRRRYTGWGRLSRKLINGIRDKQSGKTILDFLKSDGFANRNFMQLIHDDSLTFKEDIQKAQVSGQGDSLHEHIANLAGSPAIKKGILQTVKVVDELVKVMGRHKPENIVIEMARENQTTQKGQKNSRERMKRIEEGIKELGSQILKEHPVENTQLQNEKLYLYYLQNGRDMYVDQELDINRLSDYDVDHIVPQSFLKDDSIDNKVLTRSDKNRGKSDNVPSEEVVKKMKNYWRQLLNAKLITQRKFDNLTKAERGGLSELDKAGFIKRQLVETRQITKHVAQILDSRMNTKYDENDKLIREVKVITLKSKLVSDFRKDFQFYKVREINNYHHAHDAYLNAVVGTALIKKYPKLESEFVYGDYKVYDVRKMIAKSEQEIGKATAKYFFYSNIMNFFKTEITLANGEIRKRPLIETNGETGEIVWDKGRDFATVRKVLSMPQVNIVKKTEVQTGGFSKESILPKRNSDKLIARKKDWDPKKYGGFDSPTVAYSVLVVAKVEKGKSKKLKSVKELLGITIMERSSFEKNPIDFLEAKGYKEVKKDLIIKLPKYSLFELENGRKRMLASAGELQKGNELALPSKYVNFLYLASHYEKLKGSPEDNEQKQLFVEQHKHYLDEIIEQISEFSKRVILADANLDKVLSAYNKHRDKPIREQAENIIHLFTLTNLGAPAAFKYFDTTIDRKRYTSTKEVLDATLIHQSITGLYETRIDLSQLGGDSGGSGGSGGSTNLSDIIEKETGKQLVIQESILMLPEEVEEVIGNKPESDILVHTAYDESTDENVMLLTSDAPEYKPWALVIQDSNGENKIKMLSGGSGGSGGSTNLSDIIEKETGKQLVIQESILMLPEEVEEVIGNKPESDILVHTAYDESTDENVMLLTSDAPEYKPWALVIQDSNGENKIKMLSGGSKRTADGSEFEPKKKRKV

SEQ ID NO: 265 - protein, 2006 aa, Artificial Sequence
  Synthetic
MKRTADGSEFESPKKKRKVNPQIRNPMERMYRDTFYDNFENEPILYGRSYTWLCYEVKIKRGRSNLLWDTGVFRGQVYFKPQYHAEMCFLSWFCGNQLPAYKCFQITWFVSWTPCPDCVAKLAEFLSEHPNVTLTISAARLYYYWERDYRRALCRLSQAGARVTIMDYEEFAYCWENFVYNEGQQFMPWYKFDENYAFLHRTLKEILRYLMDPDTFTFNFNNDPLVLRRRQTYLCYEVERLDNGTWVLMDQHMGFLCNEAKNLLCGFYGRHAELRFLDLVPSLQLDPAQIYRVTWFISWSPCFSWGCAGEVRAFLQENTHVRLRIFAARIYDYDPLYKEALQMLRDAGAQVSIMTYDEFEYCWDTFVYRQGCPFQPWDGLEEHSQALSGRLRAILQNQGNSGGSSGGSSGSETPGTSESATPESSGGSSGGSDKKYSIGLAIGTNSVGWAVITDEYKVPSKKFKVLGNTDRHSIKKNLIGALLFDSGETAEATRLKRTARRRYTRRKNRICYLQEIFSNEMAKVDDSFFHRLEESFLVEEDKKHERHPIFGNIVDEVAYHEKYPTIYHLRKKLVDSTDKADLRLIYLALAHMIKFRGHFLIEGDLNPDNSDVDKLFIQLVQTYNQLFEENPINASGVDAKAILSARLSKSRRLENLIAQLPGEKKNGLFGNLIALSLGLTPNFKSNFDLAEDAKLQLSKDTYDDDLDNLLAQIGDQYADLFLAAKNLSDAILLSDILRVNTEITKAPLSASMIKRYDEHHQDLTLLKALVRQQLPEKYKEIFFDQSKNGYAGYIDGGASQEEFYKFIKPILEKMDGTEELLVKLNREDLLRKQRTFDNGSIPHQIHLGELHAILRRQEDFYPFLKDNREKIEKILTFRIPYYVGPLARGNSRFAWMTRKSEETITPWNFEEVVDKGASAQSFIERMTNFDKNLPNEKVLPKHSLLYEYFTVYNELTKVKYVTEGMRKPAFLSGEQKKAIVDLLFKTNRKVTVKQLKEDYFKKIECFDSVEISGVEDRFNASLGTYHDLLKIIKDKDFLDNEENEDILEDIVLTLTLFEDREMIEERLKTYAHLFDDKVMKQLKRRRYTGWGRLSRKLINGIRDKQSGKTILDFLKSDGFANRNFMQLIHDDSLTFKEDIQKAQVSGQGDSLHEHIANLAGSPAIKKGILQTVKVVDELVKVMGRHKPENIVIEMARENQTTQKGQKNSRERMKRIEEGIKELGSQILKEHPVENTQLQNEKLYLYYLQNGRDMYVDQELDINRLSDYDVDHIVPQSFLKDDSIDNKVLTRSDKNRGKSDNVPSEEVVKKMKNYWRQLLNAKLITQRKFDNLTKAERGGLSELDKAGFIKRQLVETRQITKHVAQILDSRMNTKYDENDKLIREVKVITLKSKLVSDFRKDFQFYKVREINNYHHAHDAYLNAVVGTALIKKYPKLESEFVYGDYKVYDVRKMIAKSEQEIGKATAKYFFYSNIMNFFKTEITLANGEIRKRPLIETNGETGEIVWDKGRDFATVRKVLSMPQVNIVKKTEVQTGGFSKESILPKRNSDKLIARKKDWDPKKYGGFDSPTVAYSVLVVAKVEKGKSKKLKSVKELLGITIMERSSFEKNPIDFLEAKGYKEVKKDLIIKLPKYSLFELENGRKRMLASAGELQKGNELALPSKYVNFLYLASHYEKLKGSPEDNEQKQLFVEQHKHYLDEIIEQISEFSKRVILADANLDKVLSAYNKHRDKPIREQAENIIHLFTLTNLGAPAAFKYFDTTIDRKRYTSTKEVLDATLIHQSITGLYETRIDLSQLGGDSGGSGGSGGSTNLSDIIEKETGKQLVIQESILMLPEEVEEVIGNKPESDILVHTAYDESTDENVMLLTSDAPEYKPWALVIQDSNGENKIKMLSGGSGGSGGSTNLSDIIEKETGKQLVIQESILMLPEEVEEVIGNKPESDILVHTAYDESTDENVMLLTSDAPEYKPWALVIQDSNGENKIKMLSGGSKRTADGSEFEPKKKRKV

SEQ ID NO: 266 - protein, 2008 aa, Artificial Sequence
  Synthetic
MKRTADGSEFESPKKKRKVKPHFRNTVERMYRDTFSYNFYNRPILSRRNTVWLCYEVKTKGPSRPPLDAKIFRGQVYSELKYHPEMRFFHWFSKWRKLHRDQEYEVTWYISWSPCTKCTRDMATFLAEDPKVTLTIFVARLYYFWDPDYQEALRSLCQKRDGPRATMKIMNYDEFQHCWSKFVYSQRELFEPWNNLPKYYILLHIMLGEILRHSMDPPTFTFNFNNEPWVRGRHETYLCYEVERMHNDTWVLLNQRRGFLCNQAPHKHGFLEGRHAELCFLDVIPFWKLDLDQDYRVTCFTSWSPCFSCAQEMAKFISKNKHVSLCIFTARIYDDQGRCQEGLRTLAEAGAKISIMTYSEFKHCWDTFVDHQGCPFQPWDGLDEHSQDLSGRLRAILQNQENSGGSSGGSSGSETPGTSESATPESSGGSSGGSDKKYSIGLAIGTNSVGWAVITDEYKVPSKKFKVLGNTDRHSIKKNLIGALLFDSGETAEATRLKRTARRRYTRRKNRICYLQEIFSNEMAKVDDSFFHRLEESFLVEEDKKHERHPIFGNIVDEVAYHEKYPTIYHLRKKLVDSTDKADLRLIYLALAHMIKFRGHFLIEGDLNPDNSDVDKLFIQLVQTYNQLFEENPINASGVDAKAILSARLSKSRRLENLIAQLPGEKKNGLFGNLIALSLGLTPNFKSNFDLAEDAKLQLSKDTYDDDLDNLLAQIGDQYADLFLAAKNLSDAILLSDILRVNTEITKAPLSASMIKRYDEHHQDLTLLKALVRQQLPEKYKEIFFDQSKNGYAGYIDGGASQEEFYKFIKPILEKMDGTEELLVKLNREDLLRKQRTFDNGSIPHQIHLGELHAILRRQEDFYPFLKDNREKIEKILTFRIPYYVGPLARGNSRFAWMTRKSEETITPWNFEEVVDKGASAQSFIERMTNFDKNLPNEKVLPKHSLLYEYFTVYNELTKVKYVTEGMRKPAFLSGEQKKAIVDLLFKTNRKVTVKQLKEDYFKKIECFDSVEISGVEDRFNASLGTYHDLLKIIKDKDFLDNEENEDILEDIVLTLTLFEDREMIEERLKTYAHLFDDKVMKQLKRRRYTGWGRLSRKLINGIRDKQSGKTILDFLKSDGFANRNFMQLIHDDSLTFKEDIQKAQVSGQGDSLHEHIANLAGSPAIKKGILQTVKVVDELVKVMGRHKPENIVIEMARENQTTQKGQKNSRERMKRIEEGIKELGSQILKEHPVENTQLQNEKLYLYYLQNGRDMYVDQELDINRLSDYDVDHIVPQSFLKDDSIDNKVLTRSDKNRGKSDNVPSEEVVKKMKNYWRQLLNAKLITQRKFDNLTKAERGGLSELDKAGFIKRQLVETRQITKHVAQILDSRMNTKYDENDKLIREVKVITLKSKLVSDFRKDFQFYKVREINNYHHAHDAYLNAVVGTALIKKYPKLESEFVYGDYKVYDVRKMIAKSEQEIGKATAKYFFYSNIMNFFKTEITLANGEIRKRPLIETNGETGEIVWDKGRDFATVRKVLSMPQVNIVKKTEVQTGGFSKESILPKRNSDKLIARKKDWDPKKYGGFDSPTVAYSVLVVAKVEKGKSKKLKSVKELLGITIMERSSFEKNPIDFLEAKGYKEVKKDLIIKLPKYSLFELENGRKRMLASAGELQKGNELALPSKYVNFLYLASHYEKLKGSPEDNEQKQLFVEQHKHYLDEIIEQISEFSKRVILADANLDKVLSAYNKHRDKPIREQAENIIHLFTLTNLGAPAAFKYFDTTIDRKRYTSTKEVLDATLIHQSITGLYETRIDLSQLGGDSGGSGGSGGSTNLSDIIEKETGKQLVIQESILMLPEEVEEVIGNKPESDILVHTAYDESTDENVMLLTSDAPEYKPWALVIQDSNGENKIKMLSGGSGGSGGSTNLSDIIEKETGKQLVIQESILMLPEEVEEVIGNKPESDILVHTAYDESTDENVMLLTSDAPEYKPWALVIQDSNGENKIKMLSGGSKRTADGSEFEPKKKRKV

SEQ ID NO: 267 - protein, 1822 aa, Artificial Sequence
  Synthetic
MKRTADGSEFESPKKKRKVDSLLMNRRKFLYQFKNVRWAKGRRETYLCYVVKRRDSATSFSLDFGYLRNKNGCHVELLFLRYISDWDLDPGRCYRVTWFTSWSPCYDCARHVADFLRGNPNLSLRIFTARLYFCEDRKAEPEGLRRLHRAGVQIAIMTFKDYFYCWNTFVENHERTFKAWEGLHENSVRLSRQLRRILLPLYEVDDLRDAFRTLGLSGGSSGGSSGSETPGTSESATPESSGGSSGGSDKKYSIGLAIGTNSVGWAVITDEYKVPSKKFKVLGNTDRHSIKKNLIGALLFDSGETAEATRLKRTARRRYTRRKNRICYLQEIFSNEMAKVDDSFFHRLEESFLVEEDKKHERHPIFGNIVDEVAYHEKYPTIYHLRKKLVDSTDKADLRLIYLALAHMIKFRGHFLIEGDLNPDNSDVDKLFIQLVQTYNQLFEENPINASGVDAKAILSARLSKSRRLENLIAQLPGEKKNGLFGNLIALSLGLTPNFKSNFDLAEDAKLQLSKDTYDDDLDNLLAQIGDQYADLFLAAKNLSDAILLSDILRVNTEITKAPLSASMIKRYDEHHQDLTLLKALVRQQLPEKYKEIFFDQSKNGYAGYIDGGASQEEFYKFIKPILEKMDGTEELLVKLNREDLLRKQRTFDNGSIPHQIHLGELHAILRRQEDFYPFLKDNREKIEKILTFRIPYYVGPLARGNSRFAWMTRKSEETITPWNFEEVVDKGASAQSFIERMTNFDKNLPNEKVLPKHSLLYEYFTVYNELTKVKYVTEGMRKPAFLSGEQKKAIVDLLFKTNRKVTVKQLKEDYFKKIECFDSVEISGVEDRFNASLGTYHDLLKIIKDKDFLDNEENEDILEDIVLTLTLFEDREMIEERLKTYAHLFDDKVMKQLKRRRYTGWGRLSRKLINGIRDKQSGKTILDFLKSDGFANRNFMQLIHDDSLTFKEDIQKAQVSGQGDSLHEHIANLAGSPAIKKGILQTVKVVDELVKVMGRHKPENIVIEMARENQTTQKGQKNSRERMKRIEEGIKELGSQILKEHPVENTQLQNEKLYLYYLQNGRDMYVDQELDINRLSDYDVDHIVPQSFLKDDSIDNKVLTRSDKNRGKSDNVPSEEVVKKMKNYWRQLLNAKLITQRKFDNLTKAERGGLSELDKAGFIKRQLVETRQITKHVAQILDSRMNTKYDENDKLIREVKVITLKSKLVSDFRKDFQFYKVREINNYHHAHDAYLNAVVGTALIKKYPKLESEFVYGDYKVYDVRKMIAKSEQEIGKATAKYFFYSNIMNFFKTEITLANGEIRKRPLIETNGETGEIVWDKGRDFATVRKVLSMPQVNIVKKTEVQTGGFSKESILPKRNSDKLIARKKDWDPKKYGGFDSPTVAYSVLVVAKVEKGKSKKLKSVKELLGITIMERSSFEKNPIDFLEAKGYKEVKKDLIIKLPKYSLFELENGRKRMLASAGELQKGNELALPSKYVNFLYLASHYEKLKGSPEDNEQKQLFVEQHKHYLDEIIEQISEFSKRVILADANLDKVLSAYNKHRDKPIREQAENIIHLFTLTNLGAPAAFKYFDTTIDRKRYTSTKEVLDATLIHQSITGLYETRIDLSQLGGDSGGSGGSGGSTNLSDIIEKETGKQLVIQESILMLPEEVEEVIGNKPESDILVHTAYDESTDENVMLLTSDAPEYKPWALVIQDSNGENKIKMLSGGSGGSGGSTNLSDIIEKETGKQLVIQESILMLPEEVEEVIGNKPESDILVHTAYDESTDENVMLLTSDAPEYKPWALVIQDSNGENKIKMLSGGSKRTADGSEFEPKKKRKV

SEQ ID NO: 268 - protein, 1832 aa, Artificial Sequence
  Synthetic
MKRTADGSEFESPKKKRKVTDAEYVRIHEKLDIYTFKKQFFNNKKSVSHRCYVLFELKRRGERRACFWGYAVNKPQSGTERGIHAEIFSIRKVEEYLRDNPGQFTINWYSSWSPCADCAEKILEWYNQELRGNGHTLKIWACKLYYEKNARNQIGLWNLRDNGVGLNVMVSEHYQCCRKIFIQSSHNQLNENRWLEKTLKRAEKRRSELSIMIQVKILHTTKSPAVSGGSSGGSSGSETPGTSESATPESSGGSSGGSDKKYSIGLAIGTNSVGWAVITDEYKVPSKKFKVLGNTDRHSIKKNLIGALLFDSGETAEATRLKRTARRRYTRRKNRICYLQEIFSNEMAKVDDSFFHRLEESFLVEEDKKHERHPIFGNIVDEVAYHEKYPTIYHLRKKLVDSTDKADLRLIYLALAHMIKFRGHFLIEGDLNPDNSDVDKLFIQLVQTYNQLFEENPINASGVDAKAILSARLSKSRRLENLIAQLPGEKKNGLFGNLIALSLGLTPNFKSNFDLAEDAKLQLSKDTYDDDLDNLLAQIGDQYADLFLAAKNLSDAILLSDILRVNTEITKAPLSASMIKRYDEHHQDLTLLKALVRQQLPEKYKEIFFDQSKNGYAGYIDGGASQEEFYKFIKPILEKMDGTEELLVKLNREDLLRKQRTFDNGSIPHQIHLGELHAILRRQEDFYPFLKDNREKIEKILTFRIPYYVGPLARGNSRFAWMTRKSEETITPWNFEEVVDKGASAQSFIERMTNFDKNLPNEKVLPKHSLLYEYFTVYNELTKVKYVTEGMRKPAFLSGEQKKAIVDLLFKTNRKVTVKQLKEDYFKKIECFDSVEISGVEDRFNASLGTYHDLLKIIKDKDFLDNEENEDILEDIVLTLTLFEDREMIEERLKTYAHLFDDKVMKQLKRRRYTGWGRLSRKLINGIRDKQSGKTILDFLKSDGFANRNFMQLIHDDSLTFKEDIQKAQVSGQGDSLHEHIANLAGSPAIKKGILQTVKVVDELVKVMGRHKPENIVIEMARENQTTQKGQKNSRERMKRIEEGIKELGSQILKEHPVENTQLQNEKLYLYYLQNGRDMYVDQELDINRLSDYDVDHIVPQSFLKDDSIDNKVLTRSDKNRGKSDNVPSEEVVKKMKNYWRQLLNAKLITQRKFDNLTKAERGGLSELDKAGFIKRQLVETRQITKHVAQILDSRMNTKYDENDKLIREVKVITLKSKLVSDFRKDFQFYKVREINNYHHAHDAYLNAVVGTALIKKYPKLESEFVYGDYKVYDVRKMIAKSEQEIGKATAKYFFYSNIMNFFKTEITLANGEIRKRPLIETNGETGEIVWDKGRDFATVRKVLSMPQVNIVKKTEVQTGGFSKESILPKRNSDKLIARKKDWDPKKYGGFDSPTVAYSVLVVAKVEKGKSKKLKSVKELLGITIMERSSFEKNPIDFLEAKGYKEVKKDLIIKLPKYSLFELENGRKRMLASAGELQKGNELALPSKYVNFLYLASHYEKLKGSPEDNEQKQLFVEQHKHYLDEIIEQISEFSKRVILADANLDKVLSAYNKHRDKPIREQAENIIHLFTLTNLGAPAAFKYFDTTIDRKRYTSTKEVLDATLIHQSITGLYETRIDLSQLGGDSGGSGGSGGSTNLSDIIEKETGKQLVIQESILMLPEEVEEVIGNKPESDILVHTAYDESTDENVMLLTSDAPEYKPWALVIQDSNGENKIKMLSGGSGGSGGSTNLSDIIEKETGKQLVIQESILMLPEEVEEVIGNKPESDILVHTAYDESTDENVMLLTSDAPEYKPWALVIQDSNGENKIKMLSGGSKRTADGSEFEPKKKRKV

SEQ ID NO: 269 - protein, 1786 aa, Artificial Sequence
  Synthetic
MKRTADGSEFESPKKKRKVFERNYDPRELRKETYLLYEIKWGKSGKLWRHWCQNNRTQHAEVYFLENIFNARRFNPSTHCSITWYLSWSPCAECSQKIVDFLKEHPNVNLEIYVARLYYHEDERNRQGLRDLVNSGVTIRIMDLPDYNYCWKTFVSDQGGDEDYWPGHFAPWIKQYSLKLSGGSSGGSSGSETPGTSESATPESSGGSSGGSDKKYSIGLAIGTNSVGWAVITDEYKVPSKKFKVLGNTDRHSIKKNLIGALLFDSGETAEATRLKRTARRRYTRRKNRICYLQEIFSNEMAKVDDSFFHRLEESFLVEEDKKHERHPIFGNIVDEVAYHEKYPTIYHLRKKLVDSTDKADLRLIYLALAHMIKFRGHFLIEGDLNPDNSDVDKLFIQLVQTYNQLFEENPINASGVDAKAILSARLSKSRRLENLIAQLPGEKKNGLFGNLIALSLGLTPNFKSNFDLAEDAKLQLSKDTYDDDLDNLLAQIGDQYADLFLAAKNLSDAILLSDILRVNTEITKAPLSASMIKRYDEHHQDLTLLKALVRQQLPEKYKEIFFDQSKNGYAGYIDGGASQEEFYKFIKPILEKMDGTEELLVKLNREDLLRKQRTFDNGSIPHQIHLGELHAILRRQEDFYPFLKDNREKIEKILTFRIPYYVGPLARGNSRFAWMTRKSEETITPWNFEEVVDKGASAQSFIERMTNFDKNLPNEKVLPKHSLLYEYFTVYNELTKVKYVTEGMRKPAFLSGEQKKAIVDLLFKTNRKVTVKQLKEDYFKKIECFDSVEISGVEDRFNASLGTYHDLLKIIKDKDFLDNEENEDILEDIVLTLTLFEDREMIEERLKTYAHLFDDKVMKQLKRRRYTGWGRLSRKLINGIRDKQSGKTILDFLKSDGFANRNFMQLIHDDSLTFKEDIQKAQVSGQGDSLHEHIANLAGSPAIKKGILQTVKVVDELVKVMGRHKPENIVIEMARENQTTQKGQKNSRERMKRIEEGIKELGSQILKEHPVENTQLQNEKLYLYYLQNGRDMYVDQELDINRLSDYDVDHIVPQSFLKDDSIDNKVLTRSDKNRGKSDNVPSEEVVKKMKNYWRQLLNAKLITQRKFDNLTKAERGGLSELDKAGFIKRQLVETRQITKHVAQILDSRMNTKYDENDKLIREVKVITLKSKLVSDFRKDFQFYKVREINNYHHAHDAYLNAVVGTALIKKYPKLESEFVYGDYKVYDVRKMIAKSEQEIGKATAKYFFYSNIMNFFKTEITLANGEIRKRPLIETNGETGEIVWDKGRDFATVRKVLSMPQVNIVKKTEVQTGGFSKESILPKRNSDKLIARKKDWDPKKYGGFDSPTVAYSVLVVAKVEKGKSKKLKSVKELLGITIMERSSFEKNPIDFLEAKGYKEVKKDLIIKLPKYSLFELENGRKRMLASAGELQKGNELALPSKYVNFLYLASHYEKLKGSPEDNEQKQLFVEQHKHYLDEIIEQISEFSKRVILADANLDKVLSAYNKHRDKPIREQAENIIHLFTLTNLGAPAAFKYFDTTIDRKRYTSTKEVLDATLIHQSITGLYETRIDLSQLGGDSGGSGGSGGSTNLSDIIEKETGKQLVIQESILMLPEEVEEVIGNKPESDILVHTAYDESTDENVMLLTSDAPEYKPWALVIQDSNGENKIKMLSGGSGGSGGSTNLSDIIEKETGKQLVIQESILMLPEEVEEVIGNKPESDILVHTAYDESTDENVMLLTSDAPEYKPWALVIQDSNGENKIKMLSGGSKRTADGSEFEPKKKRKV

SEQ ID NO: 270 - protein, 1823 aa, Artificial Sequence
  Synthetic
MKRTADGSEFESPKKKRKVEASPASGPRHLMDPHIFTSNFNNGIGRHKTYLCYEVERLDNGTSVKMDQHRGFLHGQAKNLLCGFYGRHAELRFLDLVPSLQLDPAQIYRVTWFISWSPCFSWGCAGEVRAFLQENTHVRLRIFAARIYDYDPLYKEALQMLRDAGAQVSIMTYDEFKHCWDTFVDHQGCPFQPWDGLDEHSQALSGRLRAILQNQGNSGGSSGGSSGSETPGTSESATPESSGGSSGGSDKKYSIGLAIGTNSVGWAVITDEYKVPSKKFKVLGNTDRHSIKKNLIGALLFDSGETAEATRLKRTARRRYTRRKNRICYLQEIFSNEMAKVDDSFFHRLEESFLVEEDKKHERHPIFGNIVDEVAYHEKYPTIYHLRKKLVDSTDKADLRLIYLALAHMIKFRGHFLIEGDLNPDNSDVDKLFIQLVQTYNQLFEENPINASGVDAKAILSARLSKSRRLENLIAQLPGEKKNGLFGNLIALSLGLTPNFKSNFDLAEDAKLQLSKDTYDDDLDNLLAQIGDQYADLFLAAKNLSDAILLSDILRVNTEITKAPLSASMIKRYDEHHQDLTLLKALVRQQLPEKYKEIFFDQSKNGYAGYIDGGASQEEFYKFIKPILEKMDGTEELLVKLNREDLLRKQRTFDNGSIPHQIHLGELHAILRRQEDFYPFLKDNREKIEKILTFRIPYYVGPLARGNSRFAWMTRKSEETITPWNFEEVVDKGASAQSFIERMTNFDKNLPNEKVLPKHSLLYEYFTVYNELTKVKYVTEGMRKPAFLSGEQKKAIVDLLFKTNRKVTVKQLKEDYFKKIECFDSVEISGVEDRFNASLGTYHDLLKIIKDKDFLDNEENEDILEDIVLTLTLFEDREMIEERLKTYAHLFDDKVMKQLKRRRYTGWGRLSRKLINGIRDKQSGKTILDFLKSDGFANRNFMQLIHDDSLTFKEDIQKAQVSGQGDSLHEHIANLAGSPAIKKGILQTVKVVDELVKVMGRHKPENIVIEMARENQTTQKGQKNSRERMKRIEEGIKELGSQILKEHPVENTQLQNEKLYLYYLQNGRDMYVDQELDINRLSDYDVDHIVPQSFLKDDSIDNKVLTRSDKNRGKSDNVPSEEVVKKMKNYWRQLLNAKLITQRKFDNLTKAERGGLSELDKAGFIKRQLVETRQITKHVAQILDSRMNTKYDENDKLIREVKVITLKSKLVSDFRKDFQFYKVREINNYHHAHDAYLNAVVGTALIKKYPKLESEFVYGDYKVYDVRKMIAKSEQEIGKATAKYFFYSNIMNFFKTEITLANGEIRKRPLIETNGETGEIVWDKGRDFATVRKVLSMPQVNIVKKTEVQTGGFSKESILPKRNSDKLIARKKDWDPKKYGGFDSPTVAYSVLVVAKVEKGKSKKLKSVKELLGITIMERSSFEKNPIDFLEAKGYKEVKKDLIIKLPKYSLFELENGRKRMLASAGELQKGNELALPSKYVNFLYLASHYEKLKGSPEDNEQKQLFVEQHKHYLDEIIEQISEFSKRVILADANLDKVLSAYNKHRDKPIREQAENIIHLFTLTNLGAPAAFKYFDTTIDRKRYTSTKEVLDATLIHQSITGLYETRIDLSQLGGDSGGSGGSGGSTNLSDIIEKETGKQLVIQESILMLPEEVEEVIGNKPESDILVHTAYDESTDENVMLLTSDAPEYKPWALVIQDSNGENKIKMLSGGSGGSGGSTNLSDIIEKETGKQLVIQESILMLPEEVEEVIGNKPESDILVHTAYDESTDENVMLLTSDAPEYKPWALVIQDSNGENKIKMLSGGSKRTADGSEFEPKKKRKV

SEQ ID NO: 271 - protein, 1853 aa, Artificial Sequence
  Synthetic
MKRTADGSEFESPKKKRKVSSETGPVAVDPTLRRRIEPHEFEVFFDPRELAAETCLLYEINWGGRHSIWRHTSQNTNKHVEVNFIEKFTTERYFCPNTRCSITWFLSWSPCGECSRAITEFLSRYPHVTLFIYIARLYHLANPRNRQGLRDLISSGVTIQIMTEQESGYCWRNFVNYSPSNEAHWPRYPHLWVRLYVLELYCIILGLPPCLNILRRKQPQLTFFTIALQSCHYQRLPPHILWATGLKSGGSSGGSSGSETPGTSESATPESSGGSSGGSDKKYSIGLAIGTNSVGWAVITDEYKVPSKKFKVLGNTDRHSIKKNLIGALLFDSGETAEATRLKRTARRRYTRRKNRICYLQEIFSNEMAKVDDSFFHRLEESFLVEEDKKHERHPIFGNIVDEVAYHEKYPTIYHLRKKLVDSTDKADLRLIYLALAHMIKFRGHFLIEGDLNPDNSDVDKLFIQLVQTYNQLFEENPINASGVDAKAILSARLSKSRRLENLIAQLPGEKKNGLFGNLIALSLGLTPNFKSNFDLAEDAKLQLSKDTYDDDLDNLLAQIGDQYADLFLAAKNLSDAILLSDILRVNTEITKAPLSASMIKRYDEHHQDLTLLKALVRQQLPEKYKEIFFDQSKNGYAGYIDGGASQEEFYKFIKPILEKMDGTEELLVKLNREDLLRKQRTFDNGSIPHQIHLGELHAILRRQEDFYPFLKDNREKIEKILTFRIPYYVGPLARGNSRFAWMTRKSEETITPWNFEEVVDKGASAQSFIERMTNFDKNLPNEKVLPKHSLLYEYFTVYNELTKVKYVTEGMRKPAFLSGEQKKAIVDLLFKTNRKVTVKQLKEDYFKKIECFDSVEISGVEDRFNASLGTYHDLLKIIKDKDFLDNEENEDILEDIVLTLTLFEDREMIEERLKTYAHLFDDKVMKQLKRRRYTGWGRLSRKLINGIRDKQSGKTILDFLKSDGFANRNFMQLIHDDSLTFKEDIQKAQVSGQGDSLHEHIANLAGSPAIKKGILQTVKVVDELVKVMGRHKPENIVIEMARENQTTQKGQKNSRERMKRIEEGIKELGSQILKEHPVENTQLQNEKLYLYYLQNGRDMYVDQELDINRLSDYDVDHIVPQSFLKDDSIDNKVLTRSDKNRGKSDNVPSEEVVKKMKNYWRQLLNAKLITQRKFDNLTKAERGGLSELDKAGFIKRQLVETRQITKHVAQILDSRMNTKYDENDKLIREVKVITLKSKLVSDFRKDFQFYKVREINNYHHAHDAYLNAVVGTALIKKYPKLESEFVYGDYKVYDVRKMIAKSEQEIGKATAKYFFYSNIMNFFKTEITLANGEIRKRPLIETNGETGEIVWDKGRDFATVRKVLSMPQVNIVKKTEVQTGGFSKESILPKRNSDKLIARKKDWDPKKYGGFDSPTVAYSVLVVAKVEKGKSKKLKSVKELLGITIMERSSFEKNPIDFLEAKGYKEVKKDLIIKLPKYSLFELENGRKRMLASAGELQKGNELALPSKYVNFLYLASHYEKLKGSPEDNEQKQLFVEQHKHYLDEIIEQISEFSKRVILADANLDKVLSAYNKHRDKPIREQAENIIHLFTLTNLGAPAAFKYFDTTIDRKRYTSTKEVLDATLIHQSITGLYETRIDLSQLGGDSGGSGGSGGSTNLSDIIEKETGKQLVIQESILMLPEEVEEVIGNKPESDILVHTAYDESTDENVMLLTSDAPEYKPWALVIQDSNGENKIKMLSGGSGGSGGSTNLSDIIEKETGKQLVIQESILMLPEEVEEVIGNKPESDILVHTAYDESTDENVMLLTSDAPEYKPWALVIQDSNGENKIKMLSGGSKRTADGSEFEPKKKRKV

SEQ ID NO: 272 - protein, 1853 aa, Artificial Sequence
  Synthetic
MKRTADGSEFESPKKKRKVSSETGPVAVDPTLRRRIEPHEFEVFFDPRELRKETCLLYEINWGGRHSIWRHTSQNTNKHVEVNFIEKFTTERYFCPNTRCSITWFLSWSPCGECSRAITEFLSRYPHVTLFIYIARLYHHADPRNRQGLRDLISSGVTIQIMTEQESGYCWRNFVNYSPSNEAHWPRYPHLWVRLYVLELYCIILGLPPCLNILRRKQPQLTFFTIALQSCHYQRLPPHILWATGLKSGGSSGGSSGSETPGTSESATPESSGGSSGGSDKKYSIGLAIGTNSVGWAVITDEYKVPSKKFKVLGNTDRHSIKKNLIGALLFDSGETAEATRLKRTARRRYTRRKNRICYLQEIFSNEMAKVDDSFFHRLEESFLVEEDKKHERHPIFGNIVDEVAYHEKYPTIYHLRKKLVDSTDKADLRLIYLALAHMIKFRGHFLIEGDLNPDNSDVDKLFIQLVQTYNQLFEENPINASGVDAKAILSARLSKSRRLENLIAQLPGEKKNGLFGNLIALSLGLTPNFKSNFDLAEDAKLQLSKDTYDDDLDNLLAQIGDQYADLFLAAKNLSDAILLSDILRVNTEITKAPLSASMIKRYDEHHQDLTLLKALVRQQLPEKYKEIFFDQSKNGYAGYIDGGASQEEFYKFIKPILEKMDGTEELLVKLNREDLLRKQRTFDNGSIPHQIHLGELHAILRRQEDFYPFLKDNREKIEKILTFRIPYYVGPLARGNSRFAWMTRKSEETITPWNFEEVVDKGASAQSFIERMTNFDKNLPNEKVLPKHSLLYEYFTVYNELTKVKYVTEGMRKPAFLSGEQKKAIVDLLFKTNRKVTVKQLKEDYFKKIECFDSVEISGVEDRFNASLGTYHDLLKIIKDKDFLDNEENEDILEDIVLTLTLFEDREMIEERLKTYAHLFDDKVMKQLKRRRYTGWGRLSRKLINGIRDKQSGKTILDFLKSDGFANRNFMQLIHDDSLTFKEDIQKAQVSGQGDSLHEHIANLAGSPAIKKGILQTVKVVDELVKVMGRHKPENIVIEMARENQTTQKGQKNSRERMKRIEEGIKELGSQILKEHPVENTQLQNEKLYLYYLQNGRDMYVDQELDINRLSDYDVDHIVPQSFLKDDSIDNKVLTRSDKNRGKSDNVPSEEVVKKMKNYWRQLLNAKLITQRKFDNLTKAERGGLSELDKAGFIKRQLVETRQITKHVAQILDSRMNTKYDENDKLIREVKVITLKSKLVSDFRKDFQFYKVREINNYHHAHDAYLNAVVGTALIKKYPKLESEFVYGDYKVYDVRKMIAKSEQEIGKATAKYFFYSNIMNFFKTEITLANGEIRKRPLIETNGETGEIVWDKGRDFATVRKVLSMPQVNIVKKTEVQTGGFSKESIRPKRNSDKLIARKKDWDPKKYGGFVSPTVAYSVLVVAKVEKGKSKKLKSVKELLGITIMERSSFEKNPIDFLEAKGYKEVKKDLIIKLPKYSLFELENGRKRMLASARFLQKGNELALPSKYVNFLYLASHYEKLKGSPEDNEQKQLFVEQHKHYLDEIIEQISEFSKRVILADANLDKVLSAYNKHRDKPIREQAENIIHLFTLTNLGAPRAFKYFDTTIDRKVYRSTKEVLDATLIHQSITGLYETRIDLSQLGGDSGGSGGSGGSTNLSDIIEKETGKQLVIQESILMLPEEVEEVIGNKPESDILVHTAYDESTDENVMLLTSDAPEYKPWALVIQDSNGENKIKMLSGGSGGSGGSTNLSDIIEKETGKQLVIQESILMLPEEVEEVIGNKPESDILVHTAYDESTDENVMLLTSDAPEYKPWALVIQDSNGENKIKMLSGGSKRTADGSEFEPKKKRKV

SEQ ID NO: 273 - protein, 1853 aa, Artificial Sequence
  Synthetic
MKRTADGSEFESPKKKRKVSSETGPVAVDPTLRRRIEPHEFEVFFDPRELRKETCLLYEINWGGRHSIWRHTSQNTNKHVEVNFIEKFTTERYFCPNTRCSITWFLSYSPCGECSRAITEFLSRYPHVTLFIYIARLYHHADPENRQGLRDLISSGVTIQIMTEQESGYCWRNFVNYSPSNEAHWPRYPHLWVRLYVLELYCIILGLPPCLNILRRKQPQLTFFTIALQSCHYQRLPPHILWATGLKSGGSSGGSSGSETPGTSESATPESSGGSSGGSDKKYSIGLAIGTNSVGWAVITDEYKVPSKKFKVLGNTDRHSIKKNLIGALLFDSGETAEATRLKRTARRRYTRRKNRICYLQEIFSNEMAKVDDSFFHRLEESFLVEEDKKHERHPIFGNIVDEVAYHEKYPTIYHLRKKLVDSTDKADLRLIYLALAHMIKFRGHFLIEGDLNPDNSDVDKLFIQLVQTYNQLFEENPINASGVDAKAILSARLSKSRRLENLIAQLPGEKKNGLFGNLIALSLGLTPNFKSNFDLAEDAKLQLSKDTYDDDLDNLLAQIGDQYADLFLAAKNLSDAILLSDILRVNTEITKAPLSASMIKRYDEHHQDLTLLKALVRQQLPEKYKEIFFDQSKNGYAGYIDGGASQEEFYKFIKPILEKMDGTEELLVKLNREDLLRKQRTFDNGSIPHQIHLGELHAILRRQEDFYPFLKDNREKIEKILTFRIPYYVGPLARGNSRFAWMTRKSEETITPWNFEEVVDKGASAQSFIERMTNFDKNLPNEKVLPKHSLLYEYFTVYNELTKVKYVTEGMRKPAFLSGEQKKAIVDLLFKTNRKVTVKQLKEDYFKKIECFDSVEISGVEDRFNASLGTYHDLLKIIKDKDFLDNEENEDILEDIVLTLTLFEDREMIEERLKTYAHLFDDKVMKQLKRRRYTGWGRLSRKLINGIRDKQSGKTILDFLKSDGFANRNFMQLIHDDSLTFKEDIQKAQVSGQGDSLHEHIANLAGSPAIKKGILQTVKVVDELVKVMGRHKPENIVIEMARENQTTQKGQKNSRERMKRIEEGIKELGSQILKEHPVENTQLQNEKLYLYYLQNGRDMYVDQELDINRLSDYDVDHIVPQSFLKDDSIDNKVLTRSDKNRGKSDNVPSEEVVKKMKNYWRQLLNAKLITQRKFDNLTKAERGGLSELDKAGFIKRQLVETRQITKHVAQILDSRMNTKYDENDKLIREVKVITLKSKLVSDFRKDFQFYKVREINNYHHAHDAYLNAVVGTALIKKYPKLESEFVYGDYKVYDVRKMIAKSEQEIGKATAKYFFYSNIMNFFKTEITLANGEIRKRPLIETNGETGEIVWDKGRDFATVRKVLSMPQVNIVKKTEVQTGGFSKESIRPKRNSDKLIARKKDWDPKKYGGFVSPTVAYSVLVVAKVEKGKSKKLKSVKELLGITIMERSSFEKNPIDFLEAKGYKEVKKDLIIKLPKYSLFELENGRKRMLASARFLQKGNELALPSKYVNFLYLASHYEKLKGSPEDNEQKQLFVEQHKHYLDEIIEQISEFSKRVILADANLDKVLSAYNKHRDKPIREQAENIIHLFTLTNLGAPRAFKYFDTTIDRKVYRSTKEVLDATLIHQSITGLYETRIDLSQLGGDSGGSGGSGGSTNLSDIIEKETGKQLVIQESILMLPEEVEEVIGNKPESDILVHTAYDESTDENVMLLTSDAPEYKPWALVIQDSNGENKIKMLSGGSGGSGGSTNLSDIIEKETGKQLVIQESILMLPEEVEEVIGNKPESDILVHTAYDESTDENVMLLTSDAPEYKPWALVIQDSNGENKIKMLSGGSKRTADGSEFEPKKKRKV

SEQ ID NO: 274 - protein, 1853 aa, Artificial Sequence
  Synthetic
MKRTADGSEFESPKKKRKVSSETGPVAVDPTLRRRIEPHEFEVFFDPRELRKETCLLYEINWGGRHSIWRHTSQNTNKHVEVNFIEKFTTERYFCPNTRCSITWFLSYSPCGECSRAITEFLSRYPHVTLFIYIARLYHHADPRNRQGLEDLISSGVTIQIMTEQESGYCWRNFVNYSPSNEAHWPRYPHLWVRLYVLELYCIILGLPPCLNILRRKQPQLTFFTIALQSCHYQRLPPHILWATGLKSGGSSGGSSGSETPGTSESATPESSGGSSGGSDKKYSIGLAIGTNSVGWAVITDEYKVPSKKFKVLGNTDRHSIKKNLIGALLFDSGETAEATRLKRTARRRYTRRKNRICYLQEIFSNEMAKVDDSFFHRLEESFLVEEDKKHERHPIFGNIVDEVAYHEKYPTIYHLRKKLVDSTDKADLRLIYLALAHMIKFRGHFLIEGDLNPDNSDVDKLFIQLVQTYNQLFEENPINASGVDAKAILSARLSKSRRLENLIAQLPGEKKNGLFGNLIALSLGLTPNFKSNFDLAEDAKLQLSKDTYDDDLDNLLAQIGDQYADLFLAAKNLSDAILLSDILRVNTEITKAPLSASMIKRYDEHHQDLTLLKALVRQQLPEKYKEIFFDQSKNGYAGYIDGGASQEEFYKFIKPILEKMDGTEELLVKLNREDLLRKQRTFDNGSIPHQIHLGELHAILRRQEDFYPFLKDNREKIEKILTFRIPYYVGPLARGNSRFAWMTRKSEETITPWNFEEVVDKGASAQSFIERMTNFDKNLPNEKVLPKHSLLYEYFTVYNELTKVKYVTEGMRKPAFLSGEQKKAIVDLLFKTNRKVTVKQLKEDYFKKIECFDSVEISGVEDRFNASLGTYHDLLKIIKDKDFLDNEENEDILEDIVLTLTLFEDREMIEERLKTYAHLFDDKVMKQLKRRRYTGWGRLSRKLINGIRDKQSGKTILDFLKSDGFANRNFMQLIHDDSLTFKEDIQKAQVSGQGDSLHEHIANLAGSPAIKKGILQTVKVVDELVKVMGRHKPENIVIEMARENQTTQKGQKNSRERMKRIEEGIKELGSQILKEHPVENTQLQNEKLYLYYLQNGRDMYVDQELDINRLSDYDVDHIVPQSFLKDDSIDNKVLTRSDKNRGKSDNVPSEEVVKKMKNYWRQLLNAKLITQRKFDNLTKAERGGLSELDKAGFIKRQLVETRQITKHVAQILDSRMNTKYDENDKLIREVKVITLKSKLVSDFRKDFQFYKVREINNYHHAHDAYLNAVVGTALIKKYPKLESEFVYGDYKVYDVRKMIAKSEQEIGKATAKYFFYSNIMNFFKTEITLANGEIRKRPLIETNGETGEIVWDKGRDFATVRKVLSMPQVNIVKKTEVQTGGFSKESIRPKRNSDKLIARKKDWDPKKYGGFVSPTVAYSVLVVAKVEKGKSKKLKSVKELLGITIMERSSFEKNPIDFLEAKGYKEVKKDLIIKLPKYSLFELENGRKRMLASARFLQKGNELALPSKYVNFLYLASHYEKLKGSPEDNEQKQLFVEQHKHYLDEIIEQISEFSKRVILADANLDKVLSAYNKHRDKPIREQAENIIHLFTLTNLGAPRAFKYFDTTIDRKVYRSTKEVLDATLIHQSITGLYETRIDLSQLGGDSGGSGGSGGSTNLSDIIEKETGKQLVIQESILMLPEEVEEVIGNKPESDILVHTAYDESTDENVMLLTSDAPEYKPWALVIQDSNGENKIKMLSGGSGGSGGSTNLSDIIEKETGKQLVIQESILMLPEEVEEVIGNKPESDILVHTAYDESTDENVMLLTSDAPEYKPWALVIQDSNGENKIKMLSGGSKRTADGSEFEPKKKRKV

SEQ ID NO: 275 - protein, 1853 aa, Artificial Sequence
  Synthetic
MKRTADGSEFESPKKKRKVSSETGPVAVDPTLRRRIEPHEFEVFFDPRELRKETCLLYEINWGGRHSIWRHTSQNTNKHVEVNFIEKFTTERYFCPNTRCSITWFLSYSPCGECSRAITEFLSRYPHVTLFIYIARLYHHADPENRQGLEDLISSGVTIQIMTEQESGYCWRNFVNYSPSNEAHWPRYPHLWVRLYVLELYCIILGLPPCLNILRRKQPQLTFFTIALQSCHYQRLPPHILWATGLKSGGSSGGSSGSETPGTSESATPESSGGSSGGSDKKYSIGLAIGTNSVGWAVITDEYKVPSKKFKVLGNTDRHSIKKNLIGALLFDSGETAEATRLKRTARRRYTRRKNRICYLQEIFSNEMAKVDDSFFHRLEESFLVEEDKKHERHPIFGNIVDEVAYHEKYPTIYHLRKKLVDSTDKADLRLIYLALAHMIKFRGHFLIEGDLNPDNSDVDKLFIQLVQTYNQLFEENPINASGVDAKAILSARLSKSRRLENLIAQLPGEKKNGLFGNLIALSLGLTPNFKSNFDLAEDAKLQLSKDTYDDDLDNLLAQIGDQYADLFLAAKNLSDAILLSDILRVNTEITKAPLSASMIKRYDEHHQDLTLLKALVRQQLPEKYKEIFFDQSKNGYAGYIDGGASQEEFYKFIKPILEKMDGTEELLVKLNREDLLRKQRTFDNGSIPHQIHLGELHAILRRQEDFYPFLKDNREKIEKILTFRIPYYVGPLARGNSRFAWMTRKSEETITPWNFEEVVDKGASAQSFIERMTNFDKNLPNEKVLPKHSLLYEYFTVYNELTKVKYVTEGMRKPAFLSGEQKKAIVDLLFKTNRKVTVKQLKEDYFKKIECFDSVEISGVEDRFNASLGTYHDLLKIIKDKDFLDNEENEDILEDIVLTLTLFEDREMIEERLKTYAHLFDDKVMKQLKRRRYTGWGRLSRKLINGIRDKQSGKTILDFLKSDGFANRNFMQLIHDDSLTFKEDIQKAQVSGQGDSLHEHIANLAGSPAIKKGILQTVKVVDELVKVMGRHKPENIVIEMARENQTTQKGQKNSRERMKRIEEGIKELGSQILKEHPVENTQLQNEKLYLYYLQNGRDMYVDQELDINRLSDYDVDHIVPQSFLKDDSIDNKVLTRSDKNRGKSDNVPSEEVVKKMKNYWRQLLNAKLITQRKFDNLTKAERGGLSELDKAGFIKRQLVETRQITKHVAQILDSRMNTKYDENDKLIREVKVITLKSKLVSDFRKDFQFYKVREINNYHHAHDAYLNAVVGTALIKKYPKLESEFVYGDYKVYDVRKMIAKSEQEIGKATAKYFFYSNIMNFFKTEITLANGEIRKRPLIETNGETGEIVWDKGRDFATVRKVLSMPQVNIVKKTEVQTGGFSKESIRPKRNSDKLIARKKDWDPKKYGGFVSPTVAYSVLVVAKVEKGKSKKLKSVKELLGITIMERSSFEKNPIDFLEAKGYKEVKKDLIIKLPKYSLFELENGRKRMLASARFLQKGNELALPSKYVNFLYLASHYEKLKGSPEDNEQKQLFVEQHKHYLDEIIEQISEFSKRVILADANLDKVLSAYNKHRDKPIREQAENIIHLFTLTNLGAPRAFKYFDTTIDRKVYRSTKEVLDATLIHQSITGLYETRIDLSQLGGDSGGSGGSGGSTNLSDIIEKETGKQLVIQESILMLPEEVEEVIGNKPESDILVHTAYDESTDENVMLLTSDAPEYKPWALVIQDSNGENKIKMLSGGSGGSGGSTNLSDIIEKETGKQLVIQESILMLPEEVEEVIGNKPESDILVHTAYDESTDENVMLLTSDAPEYKPWALVIQDSNGENKIKMLSGGSKRTADGSEFEPKKKRKV

SEQ ID NO: 276 - protein, 1853 aa, Artificial Sequence
  Synthetic
MKRTADGSEFESPKKKRKVSSETGPVAVDPTLRRRIEPHEFEVFFDPRELRKETCLLYEINWGGRHSIWRHTSQNTNKHVEVNFIEKFTTERYFCPNTRCSITWFLSWSPCGECSRAITEFLSRYPHVTLFIYIARLYHHADPENRQGLEDLISSGVTIQIMTEQESGYCWRNFVNYSPSNEAHWPRYPHLWVRLYVLELYCIILGLPPCLNILRRKQPQLTFFTIALQSCHYQRLPPHILWATGLKSGGSSGGSSGSETPGTSESATPESSGGSSGGSDKKYSIGLAIGTNSVGWAVITDEYKVPSKKFKVLGNTDRHSIKKNLIGALLFDSGETAEATRLKRTARRRYTRRKNRICYLQEIFSNEMAKVDDSFFHRLEESFLVEEDKKHERHPIFGNIVDEVAYHEKYPTIYHLRKKLVDSTDKADLRLIYLALAHMIKFRGHFLIEGDLNPDNSDVDKLFIQLVQTYNQLFEENPINASGVDAKAILSARLSKSRRLENLIAQLPGEKKNGLFGNLIALSLGLTPNFKSNFDLAEDAKLQLSKDTYDDDLDNLLAQIGDQYADLFLAAKNLSDAILLSDILRVNTEITKAPLSASMIKRYDEHHQDLTLLKALVRQQLPEKYKEIFFDQSKNGYAGYIDGGASQEEFYKFIKPILEKMDGTEELLVKLNREDLLRKQRTFDNGSIPHQIHLGELHAILRRQEDFYPFLKDNREKIEKILTFRIPYYVGPLARGNSRFAWMTRKSEETITPWNFEEVVDKGASAQSFIERMTNFDKNLPNEKVLPKHSLLYEYFTVYNELTKVKYVTEGMRKPAFLSGEQKKAIVDLLFKTNRKVTVKQLKEDYFKKIECFDSVEISGVEDRFNASLGTYHDLLKIIKDKDFLDNEENEDILEDIVLTLTLFEDREMIEERLKTYAHLFDDKVMKQLKRRRYTGWGRLSRKLINGIRDKQSGKTILDFLKSDGFANRNFMQLIHDDSLTFKEDIQKAQVSGQGDSLHEHIANLAGSPAIKKGILQTVKVVDELVKVMGRHKPENIVIEMARENQTTQKGQKNSRERMKRIEEGIKELGSQILKEHPVENTQLQNEKLYLYYLQNGRDMYVDQELDINRLSDYDVDHIVPQSFLKDDSIDNKVLTRSDKNRGKSDNVPSEEVVKKMKNYWRQLLNAKLITQRKFDNLTKAERGGLSELDKAGFIKRQLVETRQITKHVAQILDSRMNTKYDENDKLIREVKVITLKSKLVSDFRKDFQFYKVREINNYHHAHDAYLNAVVGTALIKKYPKLESEFVYGDYKVYDVRKMIAKSEQEIGKATAKYFFYSNIMNFFKTEITLANGEIRKRPLIETNGETGEIVWDKGRDFATVRKVLSMPQVNIVKKTEVQTGGFSKESIRPKRNSDKLIARKKDWDPKKYGGFVSPTVAYSVLVVAKVEKGKSKKLKSVKELLGITIMERSSFEKNPIDFLEAKGYKEVKKDLIIKLPKYSLFELENGRKRMLASARFLQKGNELALPSKYVNFLYLASHYEKLKGSPEDNEQKQLFVEQHKHYLDEIIEQISEFSKRVILADANLDKVLSAYNKHRDKPIREQAENIIHLFTLTNLGAPRAFKYFDTTIDRKVYRSTKEVLDATLIHQSITGLYETRIDLSQLGGDSGGSGGSGGSTNLSDIIEKETGKQLVIQESILMLPEEVEEVIGNKPESDILVHTAYDESTDENVMLLTSDAPEYKPWALVIQDSNGENKIKMLSGGSGGSGGSTNLSDIIEKETGKQLVIQESILMLPEEVEEVIGNKPESDILVHTAYDESTDENVMLLTSDAPEYKPWALVIQDSNGENKIKMLSGGSKRTADGSEFEPKKKRKV

SEQ ID NO: 277 - protein, 1853 aa, Artificial Sequence
  Synthetic
MKRTADGSEFESPKKKRKVSSETGPVAVDPTLRRRIEPHEFEVFFDPRELAAETCLLYEINWGGRHSIWRHTSQNTNKHVEVNFIEKFTTERYFCPNTRCSITWFLSWSPCGECSRAITEFLSRYPHVTLFIYIARLYHHADPRNRQGLRDLISSGVTIQIMTEQESGYCWRNFVNYSPSNEAHWPRYPHLWVRLYVLELYCIILGLPPCLNILRRKQPQLTFFTIALQSCHYQRLPPHILWATGLKSGGSSGGSSGSETPGTSESATPESSGGSSGGSDKKYSIGLAIGTNSVGWAVITDEYKVPSKKFKVLGNTDRHSIKKNLIGALLFDSGETAEATRLKRTARRRYTRRKNRICYLQEIFSNEMAKVDDSFFHRLEESFLVEEDKKHERHPIFGNIVDEVAYHEKYPTIYHLRKKLVDSTDKADLRLIYLALAHMIKFRGHFLIEGDLNPDNSDVDKLFIQLVQTYNQLFEENPINASGVDAKAILSARLSKSRRLENLIAQLPGEKKNGLFGNLIALSLGLTPNFKSNFDLAEDAKLQLSKDTYDDDLDNLLAQIGDQYADLFLAAKNLSDAILLSDILRVNTEITKAPLSASMIKRYDEHHQDLTLLKALVRQQLPEKYKEIFFDQSKNGYAGYIDGGASQEEFYKFIKPILEKMDGTEELLVKLNREDLLRKQRTFDNGSIPHQIHLGELHAILRRQEDFYPFLKDNREKIEKILTFRIPYYVGPLARGNSRFAWMTRKSEETITPWNFEEVVDKGASAQSFIERMTNFDKNLPNEKVLPKHSLLYEYFTVYNELTKVKYVTEGMRKPAFLSGEQKKAIVDLLFKTNRKVTVKQLKEDYFKKIECFDSVEISGVEDRFNASLGTYHDLLKIIKDKDFLDNEENEDILEDIVLTLTLFEDREMIEERLKTYAHLFDDKVMKQLKRRRYTGWGRLSRKLINGIRDKQSGKTILDFLKSDGFANRNFMQLIHDDSLTFKEDIQKAQVSGQGDSLHEHIANLAGSPAIKKGILQTVKVVDELVKVMGRHKPENIVIEMARENQTTQKGQKNSRERMKRIEEGIKELGSQILKEHPVENTQLQNEKLYLYYLQNGRDMYVDQELDINRLSDYDVDHIVPQSFLKDDSIDNKVLTRSDKNRGKSDNVPSEEVVKKMKNYWRQLLNAKLITQRKFDNLTKAERGGLSELDKAGFIKRQLVETRQITKHVAQILDSRMNTKYDENDKLIREVKVITLKSKLVSDFRKDFQFYKVREINNYHHAHDAYLNAVVGTALIKKYPKLESEFVYGDYKVYDVRKMIAKSEQEIGKATAKYFFYSNIMNFFKTEITLANGEIRKRPLIETNGETGEIVWDKGRDFATVRKVLSMPQVNIVKKTEVQTGGFSKESIRPKRNSDKLIARKKDWDPKKYGGFVSPTVAYSVLVVAKVEKGKSKKLKSVKELLGITIMERSSFEKNPIDFLEAKGYKEVKKDLIIKLPKYSLFELENGRKRMLASARFLQKGNELALPSKYVNFLYLASHYEKLKGSPEDNEQKQLFVEQHKHYLDEIIEQISEFSKRVILADANLDKVLSAYNKHRDKPIREQAENIIHLFTLTNLGAPRAFKYFDTTIDRKVYRSTKEVLDATLIHQSITGLYETRIDLSQLGGDSGGSGGSGGSTNLSDIIEKETGKQLVIQESILMLPEEVEEVIGNKPESDILVHTAYDESTDENVMLLTSDAPEYKPWALVIQDSNGENKIKMLSGGSGGSGGSTNLSDIIEKETGKQLVIQESILMLPEEVEEVIGNKPESDILVHTAYDESTDENVMLLTSDAPEYKPWALVIQDSNGENKIKMLSGGSKRTADGSEFEPKKKRKV

SEQ ID NO: 278 - protein, 1874 aa, Artificial Sequence
  Synthetic
MKRTADGSEFESPKKKRKVSSETGPVAVDPTLRRRIEPHEFEVFFDPRELRKETCLLYEINWGGRHSIWRHTSQNTNKHVEVNFIEKFTTERYFCPNTRCSITWFLSYSPCGECSRAITEFLSRYPHVTLFIYIARLYHHADPENRQGLRDLISSGVTIQIMTEQESGYCWRNFVNYSPSNEAHWPRYPHLWVRLYVLELYCIILGLPPCLNILRRKQPQLTFFTIALQSCHYQRLPPHILWATGLKSGGSSGGSSGSETPGTSESATPESSGGSSGGSEIGKATAKYFFYSNIMNFFKTEITLANGEIRKRPLIETNGETGEIVWDKGRDFATVRKVLSMPQVNIVKKTEVQTGGFSKESILPKRNSDKLIARKKDWDPKKYGGFDSPTVAYSVLVVAKVEKGKSKKLKSVKELLGITIMERSSFEKNPIDFLEAKGYKEVKKDLIIKLPKYSLFELENGRKRMLASAGELQKGNELALPSKYVNFLYLASHYEKLKGSPEDNEQKQLFVEQHKHYLDEIIEQISEFSKRVILADANLDKVLSAYNKHRDKPIREQAENIIHLFTLTNLGAPAAFKYFDTTIDRKRYTSTKEVLDATLIHQSITGLYETRIDLSQLGGDGGSGGSGGSGGSGGSGGSGGMDKKYSIGLAIGTNSVGWAVITDEYKVPSKKFKVLGNTDRHSIKKNLIGALLFDSGETAEATRLKRTARRRYTRRKNRICYLQEIFSNEMAKVDDSFFHRLEESFLVEEDKKHERHPIFGNIVDEVAYHEKYPTIYHLRKKLVDSTDKADLRLIYLALAHMIKFRGHFLIEGDLNPDNSDVDKLFIQLVQTYNQLFEENPINASGVDAKAILSARLSKSRRLENLIAQLPGEKKNGLFGNLIALSLGLTPNFKSNFDLAEDAKLQLSKDTYDDDLDNLLAQIGDQYADLFLAAKNLSDAILLSDILRVNTEITKAPLSASMIKRYDEHHQDLTLLKALVRQQLPEKYKEIFFDQSKNGYAGYIDGGASQEEFYKFIKPILEKMDGTEELLVKLNREDLLRKQRTFDNGSIPHQIHLGELHAILRRQEDFYPFLKDNREKIEKILTFRIPYYVGPLARGNSRFAWMTRKSEETITPWNFEEVVDKGASAQSFIERMTNFDKNLPNEKVLPKHSLLYEYFTVYNELTKVKYVTEGMRKPAFLSGEQKKAIVDLLFKTNRKVTVKQLKEDYFKKIECFDSVEISGVEDRFNASLGTYHDLLKIIKDKDFLDNEENEDILEDIVLTLTLFEDREMIEERLKTYAHLFDDKVMKQLKRRRYTGWGRLSRKLINGIRDKQSGKTILDFLKSDGFANRNFMQLIHDDSLTFKEDIQKAQVSGQGDSLHEHIANLAGSPAIKKGILQTVKVVDELVKVMGRHKPENIVIEMARENQTTQKGQKNSRERMKRIEEGIKELGSQILKEHPVENTQLQNEKLYLYYLQNGRDMYVDQELDINRLSDYDVDHIVPQSFLKDDSIDNKVLTRSDKNRGKSDNVPSEEVVKKMKNYWRQLLNAKLITQRKFDNLTKAERGGLSELDKAGFIKRQLVETRQITKHVAQILDSRMNTKYDENDKLIREVKVITLKSKLVSDFRKDFQFYKVREINNYHHAHDAYLNAVVGTALIKKYPKLESEFVYGDYKVYDVRKMIAKSEQSGGSGGSGGSTNLSDIIEKETGKQLVIQESILMLPEEVEEVIGNKPESDILVHTAYDESTDENVMLLTSDAPEYKPWALVIQDSNGENKIKMLSGGSGGSGGSTNLSDIIEKETGKQLVIQESILMLPEEVEEVIGNKPESDILVHTAYDESTDENVMLLTSDAPEYKPWALVIQDSNGENKIKMLSGGSKRTADGSEFEPKKKRKV

SEQ ID NO: 279 - protein, 1874 aa, Artificial Sequence
  Synthetic
MKRTADGSEFESPKKKRKVSSETGPVAVDPTLRRRIEPHEFEVFFDPRELRKETCLLYEINWGGRHSIWRHTSQNTNKHVEVNFIEKFTTERYFCPNTRCSITWFLSYSPCGECSRAITEFLSRYPHVTLFIYIARLYHHADPRNRQGLEDLISSGVTIQIMTEQESGYCWRNFVNYSPSNEAHWPRYPHLWVRLYVLELYCIILGLPPCLNILRRKQPQLTFFTIALQSCHYQRLPPHILWATGLKSGGSSGGSSGSETPGTSESATPESSGGSSGGSEIGKATAKYFFYSNIMNFFKTEITLANGEIRKRPLIETNGETGEIVWDKGRDFATVRKVLSMPQVNIVKKTEVQTGGFSKESILPKRNSDKLIARKKDWDPKKYGGFDSPTVAYSVLVVAKVEKGKSKKLKSVKELLGITIMERSSFEKNPIDFLEAKGYKEVKKDLIIKLPKYSLFELENGRKRMLASAGELQKGNELALPSKYVNFLYLASHYEKLKGSPEDNEQKQLFVEQHKHYLDEIIEQISEFSKRVILADANLDKVLSAYNKHRDKPIREQAENIIHLFTLTNLGAPAAFKYFDTTIDRKRYTSTKEVLDATLIHQSITGLYETRIDLSQLGGDGGSGGSGGSGGSGGSGGSGGMDKKYSIGLAIGTNSVGWAVITDEYKVPSKKFKVLGNTDRHSIKKNLIGALLFDSGETAEATRLKRTARRRYTRRKNRICYLQEIFSNEMAKVDDSFFHRLEESFLVEEDKKHERHPIFGNIVDEVAYHEKYPTIYHLRKKLVDSTDKADLRLIYLALAHMIKFRGHFLIEGDLNPDNSDVDKLFIQLVQTYNQLFEENPINASGVDAKAILSARLSKSRRLENLIAQLPGEKKNGLFGNLIALSLGLTPNFKSNFDLAEDAKLQLSKDTYDDDLDNLLAQIGDQYADLFLAAKNLSDAILLSDILRVNTEITKAPLSASMIKRYDEHHQDLTLLKALVRQQLPEKYKEIFFDQSKNGYAGYIDGGASQEEFYKFIKPILEKMDGTEELLVKLNREDLLRKQRTFDNGSIPHQIHLGELHAILRRQEDFYPFLKDNREKIEKILTFRIPYYVGPLARGNSRFAWMTRKSEETITPWNFEEVVDKGASAQSFIERMTNFDKNLPNEKVLPKHSLLYEYFTVYNELTKVKYVTEGMRKPAFLSGEQKKAIVDLLFKTNRKVTVKQLKEDYFKKIECFDSVEISGVEDRFNASLGTYHDLLKIIKDKDFLDNEENEDILEDIVLTLTLFEDREMIEERLKTYAHLFDDKVMKQLKRRRYTGWGRLSRKLINGIRDKQSGKTILDFLKSDGFANRNFMQLIHDDSLTFKEDIQKAQVSGQGDSLHEHIANLAGSPAIKKGILQTVKVVDELVKVMGRHKPENIVIEMARENQTTQKGQKNSRERMKRIEEGIKELGSQILKEHPVENTQLQNEKLYLYYLQNGRDMYVDQELDINRLSDYDVDHIVPQSFLKDDSIDNKVLTRSDKNRGKSDNVPSEEVVKKMKNYWRQLLNAKLITQRKFDNLTKAERGGLSELDKAGFIKRQLVETRQITKHVAQILDSRMNTKYDENDKLIREVKVITLKSKLVSDFRKDFQFYKVREINNYHHAHDAYLNAVVGTALIKKYPKLESEFVYGDYKVYDVRKMIAKSEQSGGSGGSGGSTNLSDIIEKETGKQLVIQESILMLPEEVEEVIGNKPESDILVHTAYDESTDENVMLLTSDAPEYKPWALVIQDSNGENKIKMLSGGSGGSGGSTNLSDIIEKETGKQLVIQESILMLPEEVEEVIGNKPESDILVHTAYDESTDENVMLLTSDAPEYKPWALVIQDSNGENKIKMLSGGSKRTADGSEFEPKKKRKV

SEQ ID NO: 280 - protein, 1874 aa, Artificial Sequence
  Synthetic
MKRTADGSEFESPKKKRKVSSETGPVAVDPTLRRRIEPHEFEVFFDPRELRKETCLLYEINWGGRHSIWRHTSQNTNKHVEVNFIEKFTTERYFCPNTRCSITWFLSYSPCGECSRAITEFLSRYPHVTLFIYIARLYHHADPENRQGLEDLISSGVTIQIMTEQESGYCWRNFVNYSPSNEAHWPRYPHLWVRLYVLELYCIILGLPPCLNILRRKQPQLTFFTIALQSCHYQRLPPHILWATGLKSGGSSGGSSGSETPGTSESATPESSGGSSGGSEIGKATAKYFFYSNIMNFFKTEITLANGEIRKRPLIETNGETGEIVWDKGRDFATVRKVLSMPQVNIVKKTEVQTGGFSKESILPKRNSDKLIARKKDWDPKKYGGFDSPTVAYSVLVVAKVEKGKSKKLKSVKELLGITIMERSSFEKNPIDFLEAKGYKEVKKDLIIKLPKYSLFELENGRKRMLASAGELQKGNELALPSKYVNFLYLASHYEKLKGSPEDNEQKQLFVEQHKHYLDEIIEQISEFSKRVILADANLDKVLSAYNKHRDKPIREQAENIIHLFTLTNLGAPAAFKYFDTTIDRKRYTSTKEVLDATLIHQSITGLYETRIDLSQLGGDGGSGGSGGSGGSGGSGGSGGMDKKYSIGLAIGTNSVGWAVITDEYKVPSKKFKVLGNTDRHSIKKNLIGALLFDSGETAEATRLKRTARRRYTRRKNRICYLQEIFSNEMAKVDDSFFHRLEESFLVEEDKKHERHPIFGNIVDEVAYHEKYPTIYHLRKKLVDSTDKADLRLIYLALAHMIKFRGHFLIEGDLNPDNSDVDKLFIQLVQTYNQLFEENPINASGVDAKAILSARLSKSRRLENLIAQLPGEKKNGLFGNLIALSLGLTPNFKSNFDLAEDAKLQLSKDTYDDDLDNLLAQIGDQYADLFLAAKNLSDAILLSDILRVNTEITKAPLSASMIKRYDEHHQDLTLLKALVRQQLPEKYKEIFFDQSKNGYAGYIDGGASQEEFYKFIKPILEKMDGTEELLVKLNREDLLRKQRTFDNGSIPHQIHLGELHAILRRQEDFYPFLKDNREKIEKILTFRIPYYVGPLARGNSRFAWMTRKSEETITPWNFEEVVDKGASAQSFIERMTNFDKNLPNEKVLPKHSLLYEYFTVYNELTKVKYVTEGMRKPAFLSGEQKKAIVDLLFKTNRKVTVKQLKEDYFKKIECFDSVEISGVEDRFNASLGTYHDLLKIIKDKDFLDNEENEDILEDIVLTLTLFEDREMIEERLKTYAHLFDDKVMKQLKRRRYTGWGRLSRKLINGIRDKQSGKTILDFLKSDGFANRNFMQLIHDDSLTFKEDIQKAQVSGQGDSLHEHIANLAGSPAIKKGILQTVKVVDELVKVMGRHKPENIVIEMARENQTTQKGQKNSRERMKRIEEGIKELGSQILKEHPVENTQLQNEKLYLYYLQNGRDMYVDQELDINRLSDYDVDHIVPQSFLKDDSIDNKVLTRSDKNRGKSDNVPSEEVVKKMKNYWRQLLNAKLITQRKFDNLTKAERGGLSELDKAGFIKRQLVETRQITKHVAQILDSRMNTKYDENDKLIREVKVITLKSKLVSDFRKDFQFYKVREINNYHHAHDAYLNAVVGTALIKKYPKLESEFVYGDYKVYDVRKMIAKSEQSGGSGGSGGSTNLSDIIEKETGKQLVIQESILMLPEEVEEVIGNKPESDILVHTAYDESTDENVMLLTSDAPEYKPWALVIQDSNGENKIKMLSGGSGGSGGSTNLSDIIEKETGKQLVIQESILMLPEEVEEVIGNKPESDILVHTAYDESTDENVMLLTSDAPEYKPWALVIQDSNGENKIKMLSGGSKRTADGSEFEPKKKRKV

SEQ ID NO: 281 - protein, 1874 aa, Artificial Sequence
  Synthetic
MKRTADGSEFESPKKKRKVSSETGPVAVDPTLRRRIEPHEFEVFFDPRELRKETCLLYEINWGGRHSIWRHTSQNTNKHVEVNFIEKFTTERYFCPNTRCSITWFLSWSPCGECSRAITEFLSRYPHVTLFIYIARLYHHADPENRQGLEDLISSGVTIQIMTEQESGYCWRNFVNYSPSNEAHWPRYPHLWVRLYVLELYCIILGLPPCLNILRRKQPQLTFFTIALQSCHYQRLPPHILWATGLKSGGSSGGSSGSETPGTSESATPESSGGSSGGSEIGKATAKYFFYSNIMNFFKTEITLANGEIRKRPLIETNGETGEIVWDKGRDFATVRKVLSMPQVNIVKKTEVQTGGFSKESILPKRNSDKLIARKKDWDPKKYGGFDSPTVAYSVLVVAKVEKGKSKKLKSVKELLGITIMERSSFEKNPIDFLEAKGYKEVKKDLIIKLPKYSLFELENGRKRMLASAGELQKGNELALPSKYVNFLYLASHYEKLKGSPEDNEQKQLFVEQHKHYLDEIIEQISEFSKRVILADANLDKVLSAYNKHRDKPIREQAENIIHLFTLTNLGAPAAFKYFDTTIDRKRYTSTKEVLDATLIHQSITGLYETRIDLSQLGGDGGSGGSGGSGGSGGSGGSGGMDKKYSIGLAIGTNSVGWAVITDEYKVPSKKFKVLGNTDRHSIKKNLIGALLFDSGETAEATRLKRTARRRYTRRKNRICYLQEIFSNEMAKVDDSFFHRLEESFLVEEDKKHERHPIFGNIVDEVAYHEKYPTIYHLRKKLVDSTDKADLRLIYLALAHMIKFRGHFLIEGDLNPDNSDVDKLFIQLVQTYNQLFEENPINASGVDAKAILSARLSKSRRLENLIAQLPGEKKNGLFGNLIALSLGLTPNFKSNFDLAEDAKLQLSKDTYDDDLDNLLAQIGDQYADLFLAAKNLSDAILLSDILRVNTEITKAPLSASMIKRYDEHHQDLTLLKALVRQQLPEKYKEIFFDQSKNGYAGYIDGGASQEEFYKFIKPILEKMDGTEELLVKLNREDLLRKQRTFDNGSIPHQIHLGELHAILRRQEDFYPFLKDNREKIEKILTFRIPYYVGPLARGNSRFAWMTRKSEETITPWNFEEVVDKGASAQSFIERMTNFDKNLPNEKVLPKHSLLYEYFTVYNELTKVKYVTEGMRKPAFLSGEQKKAIVDLLFKTNRKVTVKQLKEDYFKKIECFDSVEISGVEDRFNASLGTYHDLLKIIKDKDFLDNEENEDILEDIVLTLTLFEDREMIEERLKTYAHLFDDKVMKQLKRRRYTGWGRLSRKLINGIRDKQSGKTILDFLKSDGFANRNFMQLIHDDSLTFKEDIQKAQVSGQGDSLHEHIANLAGSPAIKKGILQTVKVVDELVKVMGRHKPENIVIEMARENQTTQKGQKNSRERMKRIEEGIKELGSQILKEHPVENTQLQNEKLYLYYLQNGRDMYVDQELDINRLSDYDVDHIVPQSFLKDDSIDNKVLTRSDKNRGKSDNVPSEEVVKKMKNYWRQLLNAKLITQRKFDNLTKAERGGLSELDKAGFIKRQLVETRQITKHVAQILDSRMNTKYDENDKLIREVKVITLKSKLVSDFRKDFQFYKVREINNYHHAHDAYLNAVVGTALIKKYPKLESEFVYGDYKVYDVRKMIAKSEQSGGSGGSGGSTNLSDIIEKETGKQLVIQESILMLPEEVEEVIGNKPESDILVHTAYDESTDENVMLLTSDAPEYKPWALVIQDSNGENKIKMLSGGSGGSGGSTNLSDIIEKETGKQLVIQESILMLPEEVEEVIGNKPESDILVHTAYDESTDENVMLLTSDAPEYKPWALVIQDSNGENKIKMLSGGSKRTADGSEFEPKKKRKV

SEQ ID NO: 282 - protein, 1874 aa, Artificial Sequence
  Synthetic
MKRTADGSEFESPKKKRKVSSETGPVAVDPTLRRRIEPHEFEVFFDPRELAAETCLLYEINWGGRHSIWRHTSQNTNKHVEVNFIEKFTTERYFCPNTRCSITWFLSWSPCGECSRAITEFLSRYPHVTLFIYIARLYHHADPRNRQGLRDLISSGVTIQIMTEQESGYCWRNFVNYSPSNEAHWPRYPHLWVRLYVLELYCIILGLPPCLNILRRKQPQLTFFTIALQSCHYQRLPPHILWATGLKSGGSSGGSSGSETPGTSESATPESSGGSSGGSEIGKATAKYFFYSNIMNFFKTEITLANGEIRKRPLIETNGETGEIVWDKGRDFATVRKVLSMPQVNIVKKTEVQTGGFSKESILPKRNSDKLIARKKDWDPKKYGGFDSPTVAYSVLVVAKVEKGKSKKLKSVKELLGITIMERSSFEKNPIDFLEAKGYKEVKKDLIIKLPKYSLFELENGRKRMLASAGELQKGNELALPSKYVNFLYLASHYEKLKGSPEDNEQKQLFVEQHKHYLDEIIEQISEFSKRVILADANLDKVLSAYNKHRDKPIREQAENIIHLFTLTNLGAPAAFKYFDTTIDRKRYTSTKEVLDATLIHQSITGLYETRIDLSQLGGDGGSGGSGGSGGSGGSGGSGGMDKKYSIGLAIGTNSVGWAVITDEYKVPSKKFKVLGNTDRHSIKKNLIGALLFDSGETAEATRLKRTARRRYTRRKNRICYLQEIFSNEMAKVDDSFFHRLEESFLVEEDKKHERHPIFGNIVDEVAYHEKYPTIYHLRKKLVDSTDKADLRLIYLALAHMIKFRGHFLIEGDLNPDNSDVDKLFIQLVQTYNQLFEENPINASGVDAKAILSARLSKSRRLENLIAQLPGEKKNGLFGNLIALSLGLTPNFKSNFDLAEDAKLQLSKDTYDDDLDNLLAQIGDQYADLFLAAKNLSDAILLSDILRVNTEITKAPLSASMIKRYDEHHQDLTLLKALVRQQLPEKYKEIFFDQSKNGYAGYIDGGASQEEFYKFIKPILEKMDGTEELLVKLNREDLLRKQRTFDNGSIPHQIHLGELHAILRRQEDFYPFLKDNREKIEKILTFRIPYYVGPLARGNSRFAWMTRKSEETITPWNFEEVVDKGASAQSFIERMTNFDKNLPNEKVLPKHSLLYEYFTVYNELTKVKYVTEGMRKPAFLSGEQKKAIVDLLFKTNRKVTVKQLKEDYFKKIECFDSVEISGVEDRFNASLGTYHDLLKIIKDKDFLDNEENEDILEDIVLTLTLFEDREMIEERLKTYAHLFDDKVMKQLKRRRYTGWGRLSRKLINGIRDKQSGKTILDFLKSDGFANRNFMQLIHDDSLTFKEDIQKAQVSGQGDSLHEHIANLAGSPAIKKGILQTVKVVDELVKVMGRHKPENIVIEMARENQTTQKGQKNSRERMKRIEEGIKELGSQILKEHPVENTQLQNEKLYLYYLQNGRDMYVDQELDINRLSDYDVDHIVPQSFLKDDSIDNKVLTRSDKNRGKSDNVPSEEVVKKMKNYWRQLLNAKLITQRKFDNLTKAERGGLSELDKAGFIKRQLVETRQITKHVAQILDSRMNTKYDENDKLIREVKVITLKSKLVSDFRKDFQFYKVREINNYHHAHDAYLNAVVGTALIKKYPKLESEFVYGDYKVYDVRKMIAKSEQSGGSGGSGGSTNLSDIIEKETGKQLVIQESILMLPEEVEEVIGNKPESDILVHTAYDESTDENVMLLTSDAPEYKPWALVIQDSNGENKIKMLSGGSGGSGGSTNLSDIIEKETGKQLVIQESILMLPEEVEEVIGNKPESDILVHTAYDESTDENVMLLTSDAPEYKPWALVIQDSNGENKIKMLSGGSKRTADGSEFEPKKKRKV

SEQ ID NO: 283 - protein, 7 aa, Artificial Sequence
  Synthetic
PKKKRKV

SEQ ID NO: 284 - protein, 30 aa, Artificial Sequence
  Synthetic
MDSLLMNRRKFLYQFKNVRWAKGRRETYLC

SEQ ID NO: 285 - protein, 18 aa, Artificial Sequence
  Synthetic
KRTADGSEFESPKKKRKV

SEQ ID NO: 286 - protein, 17 aa, Artificial Sequence
  Synthetic
KRTADGSEFEPKKKRKV

SEQ ID NO: 287 - protein, 19 aa, Artificial Sequence
  Synthetic
NLSKRPAAIKKAGQAKKKK

SEQ ID NO: 288 - protein, 9 aa, Artificial Sequence
  Synthetic
PAAKRVKLD

SEQ ID NO: 289 - protein, 11 aa, Artificial Sequence
  Synthetic
RQRRNELKRSF

SEQ ID NO: 290 - protein, 38 aa, Artificial Sequence
  Synthetic
NQSSNFGPMKGGNFGGRSSGPYGGGGQYFAKPRNQGGY

SEQ ID NO: 291 - protein, 16 aa, Artificial Sequence
  Synthetic
  misc_feature (3)..(12): Xaa can be any naturally occurring amino acid
KRXXXXXXXXXXKKKL

SEQ ID NO: 292 - protein, 84 aa, Artificial Sequence
  Synthetic
MTNLSDIIEKETGKQLVIQESILMLPEEVEEVIGNKPESDILVHTAYDESTDENVMLLTSDAPEYKPWALVIQDSNGENKIKML

SEQ ID NO: 293 - protein, 5 aa, Artificial Sequence
  Synthetic
GGGGS

SEQ ID NO: 294 - protein, 1 aa, Artificial Sequence
  Synthetic
G

SEQ ID NO: 295 - protein, 5 aa, Artificial Sequence
  Synthetic
EAAAK

SEQ ID NO: 296 - protein, 3 aa, Artificial Sequence
  Synthetic
GGS

SEQ ID NO: 297 - protein, 4 aa, Artificial Sequence
  Synthetic
SGGS

SEQ ID NO: 298 - protein, 2 aa, Artificial Sequence
  Synthetic
  misc_feature (1)..(1): Xaa can be any naturally occurring amino acid
XP

SEQ ID NO: 299 - protein, 3 aa, Artificial Sequence
  Synthetic
GGS

SEQ ID NO: 300 - protein, 16 aa, Artificial Sequence
  Synthetic
SGSETPGTSESATPES

SEQ ID NO: 301 - protein, 32 aa, Artificial Sequence
  Synthetic
SGGSSGGSSGSETPGTSESATPESSGGSSGGS

SEQ ID NO: 302 - protein, 10 aa, Artificial Sequence
  Synthetic
SGGSGGSGGS

SEQ ID NO: 303 - protein, 4 aa, Artificial Sequence
  Synthetic
SGGS
